(19) United States
(12) Patent Application Publication
(10) Pub. No.: US 2026/0183393 A1
(43) Pub. Date: Jul. 2, 2026

(54) IMMUNOSUPPRESSANT-RESISTANT MODIFIED ALLOGENEIC MODIFIED IMMUNE CELLS AND METHODS FOR USE THEREOF

(71) Applicant: Beam Therapeutics Inc., Cambridge, MA (US)

(72) Inventors: Angelica Messana, Cambridge, MA (US); Yinmeng Yang, Cambridge, MA (US); Colby Maldini, Cambridge, MA (US)

(73) Assignee: Beam Therapeutics Inc., Cambridge, MA (US)

(21) Appl. No.: 19/331,836

(22) Filed: Sep. 17, 2025

Related U.S. Application Data
(63) Continuation of application No. PCT/US2024/020699, filed on Mar. 20, 2024.
(60) Provisional application No. 63/491,364, filed on Mar. 21, 2023.
(60) Provisional application No. 63/621,953, filed on Jan. 17, 2024.
(60) Provisional application No. 63/563,135, filed on Mar. 8, 2024.

(51) Int. Cl. A61K 40/11; A61K 31/56; A61K 35/17; A61K 40/31; A61K 40/42; A61K 40/50; A61K 45/06; A61P 35/00; C12N 5/0783; C12N 5/10; C12N 15/11; C12N 15/113

(52) U.S. Cl. CPC A61K 40/11; A61K 31/56; A61K 35/17; A61K 40/31; A61K 40/42; A61K 40/50; A61K 45/06; A61P 35/00; C12N 5/0636; C12N 5/10; C12N 15/111; C12N 15/113; C12N 2510/00

(57) ABSTRACT

As described below, the present disclosure features modified immune effector cells (e.g., T or NK cells) having increased resistance to inhibition by immunosuppressant agents relative to unmodified immune effector cells, compositions containing the same, and methods for use thereof.

### CROSS REFERENCE TO RELATED APPLICATIONS

[0001] This application is a continuation under 35 U.S.C. § 111(a) of PCT International Patent Application No. PCT/US2024/020699, filed Mar. 20, 2024, designating the United States and published in English, which claims priority to and the benefit of U.S. Provisional Application No. 63/563,135, filed Mar. 8, 2024, U.S. Provisional Application No. 63/621,953, filed Jan. 17, 2024, and U.S. Provisional Application No. 63/491,364, filed Mar. 21, 2023, the entire contents of each of which are incorporated by reference herein.

### SEQUENCE LISTING

[0002] This application contains a Sequence Listing that has been submitted electronically in XML format and is hereby incorporated by reference in its entirety. The Sequence Listing XML file, created on Mar. 11, 2026, is named 180802-049505_US_SL.xml and is 1,762,890 bytes in size.

### BACKGROUND OF THE DISCLOSURE

[0003] Allogeneic immunotherapy provides for the treatment of diseases or disorders (e.g., a neoplasia) in which immune effector cells (e.g., T cells, NK cells) expressing chimeric antigen receptors that bind an antigen present on a target cell (e.g., neoplastic cell) are administered to a subject. To generate an immune effector cell that expresses a chimeric antigen receptor (CAR), the immune effector cell is first collected from a donor separate from the subject receiving treatment (allogeneic) and genetically modified to express the chimeric antigen receptor. The resulting cell expresses the chimeric antigen receptor on its cell surface (e.g., CAR-T cell), and upon administration to the subject, the chimeric antigen receptor binds to the antigen expressed by a target cell associated with the disease or disorder. This interaction with the antigen activates the CAR-expressing immune effector cell (e.g., a CAR-T cell), which then kills, inactivates, or neutralizes target cells or molecules associated with the disease or disorder. Because allogenic CAR-expressing immune cells are obtained from a donor, the recipient's immune system may attack the foreign cells (e.g., host rejection of CAR-T cells). Thus, there is a significant need for techniques for improving immune effector cell resistance to rejection by a host.

### SUMMARY OF THE DISCLOSURE

[0004] As described below, the present disclosure features modified immune effector cells (e.g., T or NK cells) having increased resistance to inhibition by immunosuppressant agents relative to unmodified immune effector cells, pharmaceutical compositions containing such cells, and methods of using the modified immune effector cells to treat a disease, for example, by killing a target cell associated with the disease.

[0005] In one aspect, the disclosure features a method for treating a neoplasia in a subject in need thereof, the method involves administering to the subject (i) an immunosuppressant agent and (ii) a modified allogeneic immune effector cell. The modified allogeneic immune effector cell contains a chimeric antigen receptor capable of specifically binding a marker expressed by a neoplastic cell present in the subject. The allogeneic immune effector cell further contains a base edit in its genome that confers resistance to the immunosuppressant agent relative to an unmodified allogeneic immune effector cell.

[0006] In another aspect, the disclosure features a method for producing a modified allogeneic immune effector cell having increased resistance to an immunosuppressant agent. The method involves contacting the cell with (i) a base editor, or a polynucleotide encoding the base editor, and (ii) a guide polynucleotide, or a polynucleotide encoding the guide polynucleotide. The base editor contains a programmable DNA binding domain and a deaminase domain. The guide polynucleotide directs the base editor to effect a nucleobase alteration in a polynucleotide encoding a polypeptide selected from one or more of FK506-binding protein 1A (FKBP1A), nuclear receptor subfamily 3, group C, member 1 (NR3C1), and peptidyl-prolyl isomerase A (PPIA). Each nucleobase alteration effects a reduction in expression or activity of the encoded polypeptide, thereby increasing resistance of the modified immune effector cell to immunosuppression by an immunosuppressant agent selected from one or more of an mTOR inhibitor, calcineurin inhibitor, and glucocorticoid relative to an unmodified allogeneic immune effector cell.

[0007] In another aspect, the disclosure features a cell prepared according to the method of any aspect of the disclosure delineated herein, or embodiments thereof.

[0008] In another aspect, the disclosure features a pharmaceutical composition containing the cell of any aspect of the disclosure delineated herein, or embodiments thereof, and a pharmaceutically acceptable excipient.

[0009] In another aspect, the disclosure features a base editor system containing (i) a base editor, or a polynucleotide encoding the base editor, and (ii) a guide polynucleotide, or a polynucleotide encoding the guide polynucleotide. The base editor contains a programmable DNA binding domain and a deaminase domain. The guide polynucleotide directs the base editor to effect a nucleobase alteration in a polynucleotide encoding a polypeptide selected from one or more of FK506-binding protein 1A (FKBP1A), nuclear receptor subfamily 3, group C, member 1 (NR3C1), and peptidyl-prolyl isomerase A (PPIA).

[0010] In another aspect, the disclosure features a guide polynucleotide containing a spacer with a sequence containing at least 10 contiguous nucleotides selected from those sequences listed in Table 2A.

[0011] In another aspect, the disclosure features a polynucleotide encoding the base editor system, or a component thereof, or the guide polynucleotide of any aspect of the disclosure delineated herein, or embodiments thereof.

[0012] In another aspect, the disclosure features a vector containing the polynucleotide of any aspect of the disclosure delineated herein, or embodiments thereof.

[0013] In another aspect, the disclosure features a cell containing the base editor system, the guide polynucleotide, the polynucleotide, or the vector of any aspect of the disclosure delineated herein, or embodiments thereof.

[0014] In another aspect, the disclosure features a pharmaceutical composition containing the base editor system, or a component thereof, the guide polynucleotide, the polynucleotide, the vector, or the cell of any aspect of the disclosure delineated herein, or embodiments thereof.

[0015] In another aspect, the disclosure features a kit suitable for use in the method of any aspect of the disclosure delineated herein, or embodiments thereof, and containing the base editor system of, or a component thereof, the guide polynucleotide, the polynucleotide, the vector, the pharmaceutical composition, or the cell of any aspect of the disclosure delineated herein, or embodiments thereof, and a container.

[0016] In another aspect, the disclosure features a method for treating a leukemia or a lymphoma in a subject in need thereof, the method involving administering to the subject i) an immunosuppressant agent and ii) a modified allogeneic chimeric antigen receptor (CAR)-expressing T cell. The immunosuppressant agent is selected from one or more of mTOR inhibitors, calcineurin inhibitors, and glucocorticoids. The CAR is capable of specifically binding a marker expressed by a leukemia or a lymphoma cell in the subject. The modified allogeneic CAR T cell has increased resistance to the immunosuppressant agent relative to an unmodified allogeneic immune effector cell. The modified CAR T cell has been modified using a base editor system containing (a) a base editor, or a polynucleotide encoding the base editor, and (b) a guide polynucleotide, or a polynucleotide encoding the guide polynucleotide. The base editor contains an SpCas9 domain and a TadA*8.20 adenosine deaminase domain or an rAPOBEC1 domain. The guide polynucleotide contains a nucleotide sequence selected from those listed in Table 2A and directs the base editor to effect a nucleobase alteration in a polynucleotide encoding a polypeptide selected from one or more of FK506-binding protein 1A (FKBP1A), nuclear receptor subfamily 3, group C, member 1 (NR3C1), and peptidyl-prolyl isomerase A (PPIA). The nucleobase alteration reduces or eliminates activity or expression of the polypeptide in the cell.

[0017] In any aspect of the disclosure delineated herein, or embodiments thereof, the base edit reduces expression or activity of an FK506-binding protein 1A (FKBP1A), nuclear receptor subfamily 3, group C, member 1 (NR3C1), and/or peptidyl-prolyl isomerase A (PPIA) polypeptide relative to an unmodified allogeneic immune effector cell.

[0018] In any aspect of the disclosure delineated herein, or embodiments thereof, the immunosuppressant agent is selected from one or more of mTOR inhibitors, calcineurin inhibitors, and glucocorticoids.

[0019] In any aspect of the disclosure delineated herein, or embodiments thereof, the method further involves introducing the base edit to the modified allogeneic immune effector cell using a base editor system containing (i) a base editor, or a polynucleotide encoding the base editor, and (ii) a guide polynucleotide, or a polynucleotide encoding the guide polynucleotide. The base editor contains a programmable DNA binding domain and a deaminase domain. The guide polynucleotide directs the base editor to effect a nucleobase alteration in a polynucleotide encoding a polypeptide selected from one or more of FK506-binding protein 1A (FKBP1A), nuclear receptor subfamily 3, group C, member 1 (NR3C1), and peptidyl-prolyl isomerase A (PPIA).

[0020] In any aspect of the disclosure delineated herein, or embodiments thereof, the deaminase domain is an adenosine deaminase and/or a cytidine deaminase. In any aspect of the disclosure delineated herein, or embodiments thereof, the deaminase domain is a cytidine adenosine base editor (CABE). In any aspect of the disclosure delineated herein, or embodiments thereof, the deaminase domain is TadA*8.20 or rAPOBEC1, and/or the base editor is ABE8.20m or rBE4.

[0021] In any aspect of the disclosure delineated herein, or embodiments thereof, the guide polynucleotide contains at least 10 contiguous nucleotides of a spacer sequence listed in Table 2A.

[0022] In any aspect of the disclosure delineated herein, or embodiments thereof, the marker is a cluster of differentiation 19 (CD19) polypeptide. In any aspect of the disclosure delineated herein, or embodiments thereof, the marker is selected from the group consisting of CD5, CD7, CD19, CD20, CD22, CD79B, and ROR1

[0023] In any aspect of the disclosure delineated herein, or embodiments thereof, the neoplasia is a leukemia or a lymphoma. In any aspect of the disclosure delineated herein, or embodiments thereof, the neoplasia is a B-cell leukemia or a B-cell lymphoma.

[0024] In any aspect of the disclosure delineated herein, or embodiments thereof, the modified allogeneic immune effector cell shows increased proliferation, increased cytokine production, and/or increased cytotoxicity in the presence of the immunosuppressant agent relative to an unmodified allogeneic immune effector cell in the presence of the immunosuppressant agent.

[0025] In any aspect of the disclosure delineated herein, or embodiments thereof, the subject is a mammal. In embodiments, the mammal is a human.

[0026] In any aspect of the disclosure delineated herein, or embodiments thereof, the modified allogeneic immune effector cell expresses a chimeric antigen receptor capable of specifically binding a marker expressed on a target cell.

[0027] In any aspect of the disclosure delineated herein, or embodiments thereof, the nucleobase is altered with a base editing efficiency of at least about 25%, 50%, or 80%.

[0028] In any aspect of the disclosure delineated herein, or embodiments thereof, the immunosuppressant agent is selected from one or more of a rapalog, cyclosporine A, tacrolimus, dexamethasone, and/or prednisolone. In some embodiments, the rapalog is rapamycin or everolimus.

[0029] In any aspect of the disclosure delineated herein, or embodiments thereof, the modified allogeneic immune effector cell is a T cell or an NK cell. In any aspect of the disclosure delineated herein, or embodiments thereof, the modified allogeneic immune effector cell is a CD4+ or CD8+ T cell.

[0030] In any aspect of the disclosure delineated herein, or embodiments thereof, the modified allogeneic immune effector cell produces increased levels of a cytokine when activated by a target antigen in the presence of the immunosuppressant agent than the unmodified allogeneic immune effector cell. In embodiments, cytokine produced in the modified allogeneic immune effector cell is at least about 1.5-fold, 2-fold, 5-fold, or 10-fold higher than the amount produced by the unmodified allogeneic immune effector cell. In any aspect of the disclosure delineated herein, or embodiments thereof, the cytokine is tumor necrosis factor alpha (TNFa) or interferon gamma (IFNg).

[0031] In any aspect of the disclosure delineated herein, or embodiments thereof, the modified immune effector cell shows higher levels of proliferation when activated by a target antigen in the presence of the immunosuppressant agent than the unmodified allogeneic immune effector cell. In embodiments, the proliferation of the modified allogeneic immune effector cell is at least about 1.5-fold, 2-fold, 5-fold, or 10-fold higher than the proliferation of the unmodified allogeneic immune effector cells.

[0032] In any aspect of the disclosure delineated herein, or embodiments thereof, the modified allogeneic immune effector cells further contain a base edit that reduces expression of one or more polypeptides selected from one or more of beta-2-microglobulin (B2M), cluster of differentiation 3-epsilon (CD3e), cluster of differentiation 3-gamma (CD3g), class II major histocompatibility complex transactivator (CIITA), programmed cell death 1 (PD1), and T cell receptor constant region (TRAC) relative to an unmodified allogeneic immune effector cell.

[0033] In any aspect of the disclosure delineated herein, or embodiments thereof, the guide polynucleotide contains a scaffold containing the following nucleotide sequence: GUUUUAGAGCUAGAAAUAGCAAGUUAAAAUAAGGCUAGUCCGUUAUCAACUUGAAAAAGUGGCA CCGAGUCGGUGCUUUU (SEQ ID NO: 317; SpCas9 scaffold sequence), or a fragment thereof capable of binding a Cas9 polypeptide.

[0034] In any aspect of the disclosure delineated herein, or embodiments thereof, the guide polynucleotide contains a modified nucleotide.

[0035] In any aspect of the disclosure delineated herein, or embodiments thereof, the guide polynucleotide contains a sequence containing at least 10 contiguous nucleotides from the following sequence: CUCACCGUCUCCUGGGGAGA (SEQ ID NO: 553; TSBT×1538).

[0036] In any aspect of the disclosure delineated herein, or embodiments thereof, the vector is a viral vector. In any aspect of the disclosure delineated herein, or embodiments thereof, the viral vector is an AAV vector or a lentiviral vector.

[0037] In any aspect of the disclosure, or embodiments thereof, the modified allogeneic CAR-expressing T cell or modified allogeneic immune effector cell expresses functional human leukocyte antigen class I polypeptides. In any aspect of the disclosure, or embodiments thereof, the modified allogeneic CAR-expressing T cell or modified allogeneic immune effector cell expresses functional human leukocyte antigen class I polypeptides. In any aspect of the disclosure, or embodiments thereof, the modified allogeneic CAR-expressing T cell or modified allogeneic immune effector cell retains phosphorylation of the S6 ribosomal protein when contacted with rapamycin. In any aspect of the disclosure, or embodiments thereof, the modified allogeneic CAR-expressing T cell or modified allogeneic immune effector cell retains calcineurin-induced nuclear factor of activated T cells (NFAT)-driven polypeptide expression when contacted with tacrolimus. In any aspect of the disclosure, or embodiments thereof, the modified allogeneic CAR-expressing T cell or modified allogeneic immune effector cell shows proliferation, cytokine production, and/or cytotoxicity in the presence of the immunosuppressant agent that is similar to that of an allogeneic immune effector cell in the presence of the immunosuppressant agent that does not express functional human leukocyte antigen class I polypeptides.

[0038] In any aspect of the disclosure, or embodiments thereof, the method is associated with an increased reduction of leukemia or lymphoma cells in the peripheral blood, spleen, and/or bone marrow of the subject relative to a method where the subject is administered the modified allogeneic CAR-expressing T cell but not the immunosuppressant agent.

[0039] In any aspect provided herein, or embodiments thereof, the method is not a process for modifying the germline genetic identity of human beings. In any aspect provided herein, or embodiments thereof, the method is carried out in vitro or ex vivo or the cell is in vitro or ex vivo.

### Definitions

[0040] Unless defined otherwise, all technical and scientific terms used herein have the meaning commonly understood by a person skilled in the art to which this disclosure belongs. The following references provide one of skill with a general definition of many of the terms used in this disclosure: Singleton et al., Dictionary of Microbiology and Molecular Biology (2nd ed. 1994); The Cambridge Dictionary of Science and Technology (Walker ed., 1988); The Glossary of Genetics, 5th Ed., R. Rieger et al. (eds.), Springer Verlag (1991); and Hale & Marham, The Harper Collins Dictionary of Biology (1991). As used herein, the following terms have the meanings ascribed to them below, unless specified otherwise.

[0041] By “beta-2 microglobulin (β2M; B2M) polypeptide” is meant a protein having at least about 85% amino acid sequence identity to UniProt Accession No. P61769, which is provided below, or a fragment thereof having immunomodulatory activity.

>sp|P61769|B2MG_HUMAN Beta-2-Microglobulin OS=Homo sapiens OX=9606 GN=B2M PE=1 SV=1

(SEQ ID NO: 429)
MSRSVALAVLALLSLSGLEAIQRTPKIQVYSRHPAENGKSNFLNCYVSG
FHPSDIEVDLLKNGERIEKVEHSDLSFSKDWSFYLLYYTEFTPTEKDEY
ACRVNHVTLSQPKIVKWDRDM.

[0042] By “beta-2-microglobulin (β2M; B2M) polynucleotide” is meant a nucleic acid molecule encoding an β2M polypeptide, as well as the introns, exons, 3′ untranslated regions, 5′ untranslated regions, and regulatory sequences associated with its expression, or fragments thereof. The beta-2-microglobulin gene encodes a serum protein associated with the major histocompatibility complex. β2M is involved in non-self-recognition by host CD8+ T cells. An exemplary β2M polynucleotide sequence is provided at GenBank Accession No. DQ217933.1, which is provided below.

>DQ217933.1 Homo sapiens Beta-2-Microglobin (β2M) Gene, Complete Cds

[0043] CATGTCATAAATGGTAAGTCCAAGAAAAATACAGGTATTCCCCCCCAAAGAAAACTGTAAAATC GACTTTTTTCTATCTGTACTGTTTTTTATTGGTTTTTAAATTGGTTTTCCAAGTGAGTAAATCA GAATCTATCTGTAATGGATTTTAAATTTAGTGTTTCTCTGTGATGTAGTAAACAAGAAACTAGA GGCAAAAATAGCCCTGTCCCTTGCTAAACTTCTAAGGCACTTTTCTAGTACAACTCAACACTAA CATTTCAGGCCTTTAGTGCCTTATATGAGTTTTTAAAAGGGGGAAAAGGGAGGGAGCAAGAGTG TCTTAACTCATACATTTAGGCATAACAATTATTCTCATATTTTAGTTATTGAGAGGGCTGGTAG AAAAACTAGGTAAATAATATTAATAATTATAGCGCTTATTAAACACTACAGAACACTTACTATG TACCAGGCATTGTGGGAGGCTCTCTCTTGTGCATTATCTCATTTCATTAGGTCCATGGAGAGTA TTGCATTTTCTTAGTTTAGGCATGGCCTCCACAATAAAGATTATCAAAAGCCTAAAAATATGTA AAAGAAACCTAGAAGTTATTTGTTGTGCTCCTTGGGGAAGCTAGGCAAATCCTTTCAACTGAAA ACCATGGTGACTTCCAAGATCTCTGCCCCTCCCCATCGCCATGGTCCACTTCCTCTTCTCACTG TTCCTCTTAGAAAAGATCTGTGGACTCCACCACCACGAAATGGCGGCACCTTATTTATGGTCAC TTTAGAGGGTAGGTTTTCTTAATGGGTCTGCCTGTCATGTTTAACGTCCTTGGCTGGGTCCAAG GCAGATGCAGTCCAAACTCTCACTAAAATTGCCGAGCCCTTTGTCTTCCAGTGTCTAAAATATT AATGTCAATGGAATCAGGCCAGAGTTTGAATTCTAGTCTCTTAGCCTTTGTTTCCCCTGTCCAT AAAATGAATGGGGGTAATTCTTTCCTCCTACAGTTTATTTATATATTCACTAATTCATTCATTC ATCCATCCATTCGTTCATTCGGTTTACTGAGTACCTACTATGTGCCAGCCCCTGTTCTAGGGTG GAAACTAAGAGAATGATGTACCTAGAGGGCGCTGGAAGCTCTAAAGCCCTAGCAGTTACTGCTT TTACTATTAGTGGTCGTTTTTTTCTCCCCCCCGCCCCCCGACAAATCAACAGAACAAAGAAAAT TACCTAAACAGCAAGGACATAGGGAGGAACTTCTTGGCACAGAACTTTCCAAACACTTTTTCCT GAAGGGATACAAGAAGCAAGAAAGGTACTCTTTCACTAGGACCTTCTCTGAGCTGTCCTCAGGA TGCTTTTGGGACTATTTTTCTTACCCAGAGAATGGAGAAACCCTGCAGGGAATTCCCAAGCTGT AGTTATAAACAGAAGTTCTCCTTCTGCTAGGTAGCATTCAAAGATCTTAATCTTCTGGGTTTCC GTTTTCTCGAATGAAAAATGCAGGTCCGAGCAGTTAACTGGCTGGGGCACCATTAGCAAGTCAC TTAGCATCTCTGGGGCCAGTCTGCAAAGCGAGGGGGCAGCCTTAATGTGCCTCCAGCCTGAAGT CCTAGAATGAGCGCCCGGTGTCCCAAGCTGGGGCGCGCACCCCAGATCGGAGGGCGCCGATGTA CAGACAGCAAACTCACCCAGTCTAGTGCATGCCTTCTTAAACATCACGAGACTCTAAGAAAAGG AAACTGAAAACGGGAAAGTCCCTCTCTCTAACCTGGCACTGCGTCGCTGGCTTGGAGACAGGTG ACGGTCCCTGCGGGCCTTGTCCTGATTGGCTGGGCACGCGTTTAATATAAGTGGAGGCGTCGCG CTGGCGGGCATTCCTGAAGCTGACAGCATTCGGGCCGAGATGTCTCGCTCCGTGGCCTTAGCTG TGCTCGCGCTACTCTCTCTTTCTGGCCTGGAGGCTATCCAGCGTGAGTCTCTCCTACCCTCCCG CTCTGGTCCTTCCTCTCCCGCTCTGCACCCTCTGTGGCCCTCGCTGTGCTCTCTCGCTCCGTGA CTTCCCTTCTCCAAGTTCTCCTTGGTGGCCCGCCGTGGGGCTAGTCCAGGGCTGGATCTCGGGG AAGCGGCGGGGTGGCCTGGGAGTGGGGAAGGGGGTGCGCACCCGGGACGCGCGCTACTTGCCCC TTTCGGCGGGGAGCAGGGGAGACCTTTGGCCTACGGCGACGGGAGGGTCGGGACAAAGTTTAGG GCGTCGATAAGCGTCAGAGCGCCGAGGTTGGGGGAGGGTTTCTCTTCCGCTCTTTCGCGGGGCC TCTGGCTCCCCCAGCGCAGCTGGAGTGGGGGACGGGTAGGCTCGTCCCAAAGGCGCGGCGCTGA GGTTTGTGAACGCGTGGAGGGGCGCTTGGGGTCTGGGGGAGGCGTCGCCCGGGTAAGCCTGTCT GCTGCGGCTCTGCTTCCCTTAGACTGGAGAGCTGTGGACTTCGTCTAGGCGCCCGCTAAGTTCG CATGTCCTAGCACCTCTGGGTCTATGTGGGGCCACACCGTGGGGAGGAAACAGCACGCGACGTT TGTAGAATGCTTGGCTGTGATACAAAGCGGTTTCGAATAATTAACTTATTTGTTCCCATCACAT GTCACTTTTAAAAAATTATAAGAACTACCCGTTATTGACATCTTTCTGTGTGCCAAGGACTTTA TGTGCTTTGCGTCATTTAATTTTGAAAACAGTTATCTTCCGCCATAGATAACTACTATGGTTAT CTTCTGCCTCTCACAGATGAAGAAACTAAGGCACCGAGATTTTAAGAAACTTAATTACACAGGG GATAAATGGCAGCAATCGAGATTGAAGTCAAGCCTAACCAGGGCTTTTGCGGGAGCGCATGCCT TTTGGCTGTAATTCGTGCATTTTTTTTTAAGAAAAACGCCTGCCTTCTGCGTGAGATTCTCCAG AGCAAACTGGGCGGCATGGGCCCTGTGGTCTTTTCGTACAGAGGGCTTCCTCTTTGGCTCTTTG CCTGGTTGTTTCCAAGATGTACTGTGCCTCTTACTTTCGGTTTTGAAAACATGAGGGGGTTGGG CGTGGTAGCTTACGCCTGTAATCCCAGCACTTAGGGAGGCCGAGGCGGGAGGATGGCTTGAGGT CCGTAGTTGAGACCAGCCTGGCCAACATGGTGAAGCCTGGTCTCTACAAAAAATAATAACAAAA ATTAGCCGGGTGTGGTGGCTCGTGCCTGTGGTCCCAGCTGCTCCGGTGGCTGAGGCGGGAGGAT CTCTTGAGCTTAGGCTTTTGAGCTATCATGGCGCCAGTGCACTCCAGCGTGGGCAACAGAGCGA GACCCTGTCTCTCAAAAAAGAAAAAAAAAAAAAAAGAAAGAGAAAAGAAAAGAAAGAAAGAAGT GAAGGTTTGTCAGTCAGGGGAGCTGTAAAACCATTAATAAAGATAATCCAAGATGGTTACCAAG ACTGTTGAGGACGCCAGAGATCTTGAGCACTTTCTAAGTACCTGGCAATACACTAAGCGCGCTC ACCTTTTCCTCTGGCAAAACATGATCGAAAGCAGAATGTTTTGATCATGAGAAAATTGCATTTA ATTTGAATACAATTTATTTACAACATAAAGGATAATGTATATATCACCACCATTACTGGTATTT GCTGGTTATGTTAGATGTCATTTTAAAAAATAACAATCTGATATTTAAAAAAAAATCTTATTTT GAAAATTTCCAAAGTAATACATGCCATGCATAGACCATTTCTGGAAGATACCACAAGAAACATG TAATGATGATTGCCTCTGAAGGTCTATTTTCCTCCTCTGACCTGTGTGTGGGTTTTGTTTTTGT TTTACTGTGGGCATAAATTAATTTTTCAGTTAAGTTTTGGAAGCTTAAATAACTCTCCAAAAGT CATAAAGCCAGTAACTGGTTGAGCCCAAATTCAAACCCAGCCTGTCTGATACTTGTCCTCTTCT TAGAAAAGATTACAGTGATGCTCTCACAAAATCTTGCCGCCTTCCCTCAAACAGAGAGTTCCAG GCAGGATGAATCTGTGCTCTGATCCCTGAGGCATTTAATATGTTCTTATTATTAGAAGCTCAGA TGCAAAGAGCTCTCTTAGCTTTTAATGTTATGAAAAAAATCAGGTCTTCATTAGATTCCCCAAT CCACCTCTTGATGGGGCTAGTAGCCTTTCCTTAATGATAGGGTGTTTCTAGAGAGATATATCTG GTCAAGGTGGCCTGGTACTCCTCCTTCTCCCCACAGCCTCCCAGACAAGGAGGAGTAGCTGCCT TTTAGTGATCATGTACCCTGAATATAAGTGTATTTAAAAGAATTTTATACACATATATTTAGTG TCAATCTGTATATTTAGTAGCACTAACACTTCTCTTCATTTTCAATGAAAAATATAGAGTTTAT AATATTTTCTTCCCACTTCCCCATGGATGGTCTAGTCATGCCTCTCATTTTGGAAAGTACTGTT TCTGAAACATTAGGCAATATATTCCCAACCTGGCTAGTTTACAGCAATCACCTGTGGATGCTAA TTAAAACGCAAATCCCACTGTCACATGCATTACTCCATTTGATCATAATGGAAAGTATGTTCTG TCCCATTTGCCATAGTCCTCACCTATCCCTGTTGTATTTTATCGGGTCCAACTCAACCATTTAA GGTATTTGCCAGCTCTTGTATGCATTTAGGTTTTGTTTCTTTGTTTTTTAGCTCATGAAATTAG GTACAAAGTCAGAGAGGGGTCTGGCATATAAAACCTCAGCAGAAATAAAGAGGTTTTGTTGTTT GGTAAGAACATACCTTGGGTTGGTTGGGCACGGTGGCTCGTGCCTGTAATCCCAACACTTTGGG AGGCCAAGGCAGGCTGATCACTTGAAGTTGGGAGTTCAAGACCAGCCTGGCCAACATGGTGAAA TCCCGTCTCTACTGAAAATACAAAAATTAACCAGGCATGGTGGTGTGTGCCTGTAGTCCCAGGA ATCACTTGAACCCAGGAGGCGGAGGTTGCAGTGAGCTGAGATCTCACCACTGCACACTGCACTC CAGCCTGGGCAATGGAATGAGATTCCATCCCAAAAAATAAAAAAATAAAAAAATAAAGAACATA CCTTGGGTTGATCCACTTAGGAACCTCAGATAATAACATCTGCCACGTATAGAGCAATTGCTAT GTCCCAGGCACTCTACTAGACACTTCATACAGTTTAGAAAATCAGATGGGTGTAGATCAAGGCA GGAGCAGGAACCAAAAAGAAAGGCATAAACATAAGAAAAAAAATGGAAGGGGTGGAAACAGAGT ACAATAACATGAGTAATTTGATGGGGGCTATTATGAACTGAGAAATGAACTTTGAAAAGTATCT TGGGGCCAAATCATGTAGACTCTTGAGTGATGTGTTAAGGAATGCTATGAGTGCTGAGAGGGCA TCAGAAGTCCTTGAGAGCCTCCAGAGAAAGGCTCTTAAAAATGCAGCGCAATCTCCAGTGACAG AAGATACTGCTAGAAATCTGCTAGAAAAAAAACAAAAAAGGCATGTATAGAGGAATTATGAGGG AAAGATACCAAGTCACGGTTTATTCTTCAAAATGGAGGTGGCTTGTTGGGAAGGTGGAAGCTCA TTTGGCCAGAGTGGAAATGGAATTGGGAGAAATCGATGACCAAATGTAAACACTTGGTGCCTGA TATAGCTTGACACCAAGTTAGCCCCAAGTGAAATACCCTGGCAATATTAATGTGTCTTTTCCCG ATATTCCTCAGGTACTCCAAAGATTCAGGTTTACTCACGTCATCCAGCAGAGAATGGAAAGTCA AATTTCCTGAATTGCTATGTGTCTGGGTTTCATCCATCCGACATTGAAGTTGACTTACTGAAGA ATGGAGAGAGAATTGAAAAAGTGGAGCATTCAGACTTGTCTTTCAGCAAGGACTGGTCTTTCTA TCTCTTGTACTACACTGAATTCACCCCCACTGAAAAAGATGAGTATGCCTGCCGTGTGAACCAT GTGACTTTGTCACAGCCCAAGATAGTTAAGTGGGGTAAGTCTTACATTCTTTTGTAAGCTGCTG AAAGTTGTGTATGAGTAGTCATATCATAAAGCTGCTTTGATATAAAAAAGGTCTATGGCCATAC TACCCTGAATGAGTCCCATCCCATCTGATATAAACAATCTGCATATTGGGATTGTCAGGGAATG TTCTTAAAGATCAGATTAGTGGCACCTGCTGAGATACTGATGCACAGCATGGTTTCTGAACCAG TAGTTTCCCTGCAGTTGAGCAGGGAGCAGCAGCAGCACTTGCACAAATACATATACACTCTTAA CACTTCTTACCTACTGGCTTCCTCTAGCTTTTGTGGCAGCTTCAGGTATATTTAGCACTGAACG AACATCTCAAGAAGGTATAGGCCTTTGTTTGTAAGTCCTGCTGTCCTAGCATCCTATAATCCTG GACTTCTCCAGTACTTTCTGGCTGGATTGGTATCTGAGGCTAGTAGGAAGGGCTTGTTCCTGCT GGGTAGCTCTAAACAATGTATTCATGGGTAGGAACAGCAGCCTATTCTGCCAGCCTTATTTCTA ACCATTTTAGACATTTGTTAGTACATGGTATTTTAAAAGTAAAACTTAATGTCTTCCTTTTTTT TCTCCACTGTCTTTTTCATAGATCGAGACATGTAAGCAGCATCATGGAGGTAAGTTTTTGACCT TGAGAAAATGTTTTTGTTTCACTGTCCTGAGGACTATTTATAGACAGCTCTAACATGATAACCC TCACTATGTGGAGAACATTGACAGAGTAACATTTTAGCAGGGAAAGAAGAATCCTACAGGGTCA TGTTCCCTTCTCCTGTGGAGTGGCATGAAGAAGGTGTATGGCCCCAGGTATGGCCATATTACTG ACCCTCTACAGAGAGGGCAAAGGAACTGCCAGTATGGTATTGCAGGATAAAGGCAGGTGGTTAC CCACATTACCTGCAAGGCTTTGATCTTTCTTCTGCCATTTCCACATTGGACATCTCTGCTGAGG AGAGAAAATGAACCACTCTTTTCCTTTGTATAATGTTGTTTTATTCTTCAGACAGAAGAGAGGA GTTATACAGCTCTGCAGACATCCCATTCCTGTATGGGGACTGTGTTTGCCTCTTAGAGGTTCCC AGGCCACTAGAGGAGATAAAGGGAAACAGATTGTTATAACTTGATATAATGATACTATAATAGA TGTAACTACAAGGAGCTCCAGAAGCAAGAGAGAGGGAGGAACTTGGACTTCTCTGCATCTTTAG TTGGAGTCCAAAGGCTTTTCAATGAAATTCTACTGCCCAGGGTACATTGATGCTGAAACCCCAT TCAAATCTCCTGTTATATTCTAGAACAGGGAATTGATTTGGGAGAGCATCAGGAAGGTGGATGA TCTGCCCAGTCACACTGTTAGTAAATTGTAGAGCCAGGACCTGAACTCTAATATAGTCATGTGT TACTTAATGACGGGGACATGTTCTGAGAAATGCTTACACAAACCTAGGTGTTGTAGCCTACTAC ACGCATAGGCTACATGGTATAGCCTATTGCTCCTAGACTACAAACCTGTACAGCCTGTTACTGT ACTGAATACTGTGGGCAGTTGTAACACAATGGTAAGTATTTGTGTATCTAAACATAGAAGTTGC AGTAAAAATATGCTATTTTAATCTTATGAGACCACTGTCATATATACAGTCCATCATTGACCAA AACATCATATCAGCATTTTTTCTTCTAAGATTTTGGGAGCACCAAAGGGATACACTAACAGGAT ATACTCTTTATAATGGGTTTGGAGAACTGTCTGCAGCTACTTCTTTTAAAAAGGTGATCTACAC AGTAGAAATTAGACAAGTTTGGTAATGAGATCTGCAATCCAAATAAAATAAATTCATTGCTAAC CTTTTTCTTTTCTTTTCAGGTTTGAAGATGCCGCATTTGGATTGGATGAATTCCAAATTCTGCT TGCTTGCTTTTTAATATTGATATGCTTATACACTTACACTTTATGCACAAAATGTAGGGTTATA ATAATGTTAACATGGACATGATCTTCTTTATAATTCTACTTTGAGTGCTGTCTCCATGTTTGAT GTATCTGAGCAGGTTGCTCCACAGGTAGCTCTAGGAGGGCTGGCAACTTAGAGGTGGGGAGCAG AGAATTCTCTTATCCAACATCAACATCTTGGTCAGATTTGAACTCTTCAATCTCTTGCACTCAA AGCTTGTTAAGATAGTTAAGCGTGCATAAGTTAACTTCCAATTTACATACTCTGCTTAGAATTT GGGGGAAAATTTAGAAATATAATTGACAGGATTATTGGAAATTTGTTATAATGAATGAAACATT TTGTCATATAAGATTCATATTTACTTCTTATACATTTGATAAAGTAAGGCATGGTTGTGGTTAA TCTGGTTTATTTTTGTTCCACAAGTTAAATAAATCATAAAACTTGATGTGTTATCTCTTATATC TCACTCCCACTATTACCCCTTTATTTTCAAACAGGGAAACAGTCTTCAAGTTCCACTTGGTAAA AAATGTGAACCCCTTGTATATAGAGTTTGGCTCACAGTGTAAAGGGCCTCAGTGATTCACATTT TCCAGATTAGGAATCTGATGCTCAAAGAAGTTAAATGGCATAGTTGGGGTGACACAGCTGTCTA GTGGGAGGCCAGCCTTCTATATTTTAGCCAGCGTTCTTTCCTGCGGGCCAGGTCATGAGGAGTA TGCAGACTCTAAGAGGGAGCAAAAGTATCTGAAGGATTTAATATTTTAGCAAGGAATAGATATA CAATCATCCCTTGGTCTCCCTGGGGGATTGGTTTCAGGACCCCTTCTTGGACACCAAATCTATG GATATTTAAGTCCCTTCTATAAAATGGTATAGTATTTGCATATAACCTATCCACATCCTCCTGT ATACTTTAAATCATTTCTAGATTACTTGTAATACCTAATACAATGTAAATGCTATGCAAATAGT TGTTATTGTTTAAGGAATAATGACAAGAAAAAAAAGTCTGTACATGCTCAGTAAAGACACAACC ATCCCTTTTTTTCCCCAGTGTTTTTGATCCATGGTTTGCTGAATCCACAGATGTGGAGCCCCTG GATACGGAAGGCCCGCTGTACTTTGAATGACAAATAACAGATTTAAA (SEQ ID NO: 430). An exemplary B2M gene sequence is provided at (SEQ ID NO: 431).

[0044] By “cluster of differentiation 3 epsilon (CD3e or CD3 epsilon) polypeptide” is meant a protein having at least about 85% amino acid sequence identity to NCBI Accession No. NP_000724.1 or a fragment thereof having immunomodulatory activity. An exemplary amino acid sequence is provided below.

>NP 000724.1 T-Cell Surface Glycoprotein CD3 Epsilon Chain Precursor [Homo sapiens]

(SEQ ID NO: 432)
MQSGTHWRVLGLCLLSVGVWGQDGNEEMGGITQTPYKVSISGTTVILTC
PQYPGSEILWQHNDKNIGGDEDDKNIGSDEDHLSLKEFSELEQSGYYVC
YPRGSKPEDANFYLYLRARVCENCMEMDVMSVATIVIVDICITGGLLLL
VYYWSKNRKAKAKPVTRGAGAGGRQRGQNKERPPPVPNPDYEPIRKGQR
DLYSGLNQRRI

[0045] By “cluster of differentiation 3 epsilon (CD3e or CD3 epsilon) polynucleotide” is meant a polynucleotide encoding a CD3e polypeptide, as well as the introns, exons, 3′ untranslated regions, 5′ untranslated regions, and regulatory sequences associated with its expression, or fragments thereof. In embodiments, a CD3e polynucleotide is the genomic sequence, cDNA, mRNA, or gene associated with and/or required for CD3e expression. An exemplary CD3e nucleic acid sequence is provided below (NCBI Ref. Seq. Accession No. NM_000733.4).

>NM 000733.4 Homo sapiens CD3e Molecule (CD3E), mRNA

[0046] AGAAACCCTCCTCCCCTCCCAGCCTCAGGTGCCTGCTTCAGAAAATGAAGTAGTAAGTCTGCTG GCCTCCGCCATCTTAGTAAAGTAACAGTCCCATGAAACAAAGATGCAGTCGGGCACTCACTGGA GAGTTCTGGGCCTCTGCCTCTTATCAGTTGGCGTTTGGGGGCAAGATGGTAATGAAGAAATGGG TGGTATTACACAGACACCATATAAAGTCTCCATCTCTGGAACCACAGTAATATTGACATGCCCT CAGTATCCTGGATCTGAAATACTATGGCAACACAATGATAAAAACATAGGCGGTGATGAGGATG ATAAAAACATAGGCAGTGATGAGGATCACCTGTCACTGAAGGAATTTTCAGAATTGGAGCAAAG TGGTTATTATGTCTGCTACCCCAGAGGAAGCAAACCAGAAGATGCGAACTTTTATCTCTACCTG AGGGCAAGAGTGTGTGAGAACTGCATGGAGATGGATGTGATGTCGGTGGCCACAATTGTCATAG TGGACATCTGCATCACTGGGGGCTTGCTGCTGCTGGTTTACTACTGGAGCAAGAATAGAAAGGC CAAGGCCAAGCCTGTGACACGAGGAGCGGGTGCTGGCGGCAGGCAAAGGGGACAAAACAAGGAG AGGCCACCACCTGTTCCCAACCCAGACTATGAGCCCATCCGGAAAGGCCAGCGGGACCTGTATT CTGGCCTGAATCAGAGACGCATCTGACCCTCTGGAGAACACTGCCTCCCGCTGGCCCAGGTCTC CTCTCCAGTCCCCCTGCGACTCCCTGTTTCCTGGGCTAGTCTTGGACCCCACGAGAGAGAATCG TTCCTCAGCCTCATGGTGAACTCGCGCCCTCCAGCCTGATCCCCCGCTCCCTCCTCCCTGCCTT CTCTGCTGGTACCCAGTCCTAAAATATTGCTGCTTCCTCTTCCTTTGAAGCATCATCAGTAGTC ACACCCTCACAGCTGGCCTGCCCTCTTGCCAGGATATTTATTTGTGCTATTCACTCCCTTCCCT TTGGATGTAACTTCTCCGTTCAGTTCCCTCCTTTTCTTGCATGTAAGTIGTCCCCCATCCCAAA GTATTCCATCTACTTTTCTATCGCCGTCCCCTTTTGCAGCCCTCTCTGGGGATGGACTGGGTAA ATGTTGACAGAGGCCCTGCCCCGTTCACAGATCCTGGCCCTGAGCCAGCCCTGTGCTCCTCCCT CCCCCAACACTCCCTACCAACCCCCTAATCCCCTACTCCCTCCACCCCCCCTCCACTGTAGGCC ACTGGATGGTCATTTGCATCTCCGTAAATGTGCTCTGCTCCTCAGCTGAGAGAGAAAAAAATAA ACTGTATTTGGCTGCAA (SEQ ID NO: 433). An exemplary CD3e sequence is provided at ENSEMBL Accession No. ENSG00000198851 (SEQ ID NO: 434).

[0047] By “cluster of differentiation 3 gamma (CD3g or CD3 gamma) polypeptide” is meant a protein having at least about 85% amino acid sequence identity to NCBI Accession No. NP_000064.1 or a fragment thereof and having immunomodulatory activity. An exemplary amino acid sequence is provided below.

>NP_000064.1 T-Cell Surface Glycoprotein CD3 Gamma Chain Precursor [Homo sapiens]

(SEQ ID NO: 435)
MEQGKGLAVLILAIILLQGTLAQSIKGNHLVKVYDYQEDGSVLLTCDAE
AKNITWFKDGKMIGFLTEDKKKWNLGSNAKDPRGMYQCKGSQNKSKPLQ
VYYRMCQNCIELNAATISGFLFAEIVSIFVLAVGVYFIAGQDGVRQSRA
SDKQTLLPNDQLYQPLKDREDDQYSHLQGNQLRRN.

[0048] By “cluster of differentiation 3 gamma (CD3g or CD3 gamma) polynucleotide” is meant a polypeptide encoding a CD3g polypeptide, as well as the introns, exons, 3′ untranslated regions, 5′ untranslated regions, and regulatory sequences associated with its expression, or fragments thereof. In embodiments, a CD3g polynucleotide is the genomic sequence, cDNA, mRNA, or gene associated with and/or required for CD3g expression. An exemplary CD3g nucleic acid sequence is provided below (NCBI Ref. Seq. Accession No. NM_000073.3).

>NM 000073.3 Homo sapiens CD3g Molecule (CD3G), mRNA

[0049] AGTCTAGCTGCTGCACAGGCTGGCTGGCTGGCTGGCTGCTAAGGGCTGCTCCACGCTTTTGCCG GAGGACAGAGACTGACATGGAACAGGGGAAGGGCCTGGCTGTCCTCATCCTGGCTATCATTCTT CTTCAAGGTACTTTGGCCCAGTCAATCAAAGGAAACCACTTGGTTAAGGTGTATGACTATCAAG AAGATGGTTCGGTACTTCTGACTTGTGATGCAGAAGCCAAAAATATCACATGGTTTAAAGATGG GAAGATGATCGGCTTCCTAACTGAAGATAAAAAAAAATGGAATCTGGGAAGTAATGCCAAGGAC CCTCGAGGGATGTATCAGTGTAAAGGATCACAGAACAAGTCAAAACCACTCCAAGTGTATTACA GAATGTGTCAGAACTGCATTGAACTAAATGCAGCCACCATATCTGGCTTTCTCTTTGCTGAAAT CGTCAGCATTTTCGTCCTTGCTGTTGGGGTCTACTTCATTGCTGGACAGGATGGAGTTCGCCAG TCGAGAGCTTCAGACAAGCAGACTCTGTTGCCCAATGACCAGCTCTACCAGCCCCTCAAGGATC GAGAAGATGACCAGTACAGCCACCTTCAAGGAAACCAGTTGAGGAGGAATTGAACTCAGGACTC AGAGTAGTCCAGGTGTTCTCCTCCTATTCAGTTCCCAGAATCAAAGCAATGCATTTTGGAAAGC TCCTAGCAGAGAGACTTTCAGCCCTAAATCTAGACTCAAGGTTCCCAGAGATGACAAATGGAGA AGAAAGGCCATCAGAGCAAATTTGGGGGTTTCTCAAATAAAATAAAAATAAAAACAAATACTGT GTTTCAGAAGCGCCACCTATTGGGGAAAATTGTAAAAGAAAAATGAAAAGATCAAATAACCCCC TGGATTTGAATATAATTTTTTGTGTTGTAATTTTTATTTCGTTTTTGTATAGGTTATAATTCAC ATGGCTCAAATATTCAGTGAAAGCTCTCCCTCCACCGCCATCCCCTGCTACCCAGTGACCCTGT TGCCCTCTTCAGAGACAAATTAGTTTCTCTTTTTTTTTTTTTTTTTTTTTTTTTTGAGACAGTC TGGCTCTGTCACCCAGGCTGAAATGCAGTGGCACCATCTCGGCTCACTGCAACCTCTGCCTCCT GGGTTCAAGCGATTCTCCTGCCTCAGCCTCCCGGGCAGCTGGGATTACAGGCACACACTACCAC ACCTGGCTAATTTTTGTATTTTTAGTAGAGACAGGGTTTTGCTCTGTTGGCCAAGCTGGTCTCG AACTCCTGACCTCAAGTGATCCGCCCGCCTCAGCCTCCCAAAGTGCTGGGATTACAGGTGTGAG CCACCATGCCTGGTCTTAAAACCAGTTTCTTATATATCTCTCTGGAGGTATTCTAGGCATATAT GAGCACATTCTCAAGTACATATTATCCTCCCTTCCCCTATCTTTTAGACAAATGATATCAAACT ATACATCTTGTGAGATTATTGCATACCATTATATGAAGATACCATTATATCCTTTTTAATGCAA CCATATTGTACAAATAGACTATGATTTATTTAACCTGTTATCTATCAGTGGATATTTAAGTTGG TAGTTGGTTCCAATCTTTTGCTCTTACAACAATTCTGCAATGACTAACATTGTATAAATATCAT TTTTAAAAATAATTGCATTGAAGCATAATGTACATGCCATAAAATCCACCCATCTTAAGTGATT TCACCTGTTCTCAGAAATTTTTAGTAAATTTAACTAATTGTACAGCCATTACCATAATCCAGCT TTAGGACATTTTCTTTTTTTTCTTTTCTTTTCTTTTTTTTCTTTTTTTTTTTTTTTTGAAGTGG AATCTTGCTCTGTGGCCCAGGCTGGAGTGCAGTGGCGCGATCTCAGCTCACTGCAACCTCCACC TCCTGGGTTCAAGCGATTCTCTTGCCTTGGCCTCCCGAGTAGCTGAGACTACAGGCACATGCCA CCACGCCCAGCTCATTTTTTGTGTATTTAGTATTTGTGTATCTAGTATTTGTGTACTTAGTAGA GACAGGGTTTCACCATGTTGGCCAGGCTGGTCTCCAATTCCTGACCTCAGGCGATCCACCCGCC TTGACCTCCCAAAGTGCTGGGATTACAGGTGTGAGCCACCGCGCCAGGCCCGTAACTGTATTTT AATATAGCCATTCTATGGATTTAATATGGTATTTTATTATGGCCTTAATTTGCATTTCCCTAGA TACTAACCATGCTGAGTGTCCTGTCTTGTGTTTATTAACCATTCATATATTTTTAGTGAAATGT GTATCAAATCTTTTGCCCATTTTTAAGTTGACTTATTTGTTTGTCTTCTTACTATTGGGTTGCA TATGTTTTTGATATAAGTCCTTTATCAGATATATGATTTGGAAATATTTTCTACCAATCTGTGG TTTGTTTTTCTTAATGGTGTCTTTTGAAGTGCAAAAGGTTTGAATTTTGAAGTACATTTTATTG ATTTTTTCTTCTATATATTGTGCTTTTGGTATCATGTCTAATAAATCTTTACCAAACCCACAGT TACAAAGATTTTCTCCTGTCTTCTTTTTATACTTTTTACAGCTTTATGGTTTTAGCTCTAACAA TAAATGTGATTTTGAACATACATAAGACTATTTGTAACAAACACAAATAAATTGAATTGTTGGG CA (SEQ ID NO: 436). An exemplary CD3g sequence is provided at ENSEMBL Accession No. ENSG00000160654 (SEQ ID NO: 437).

[0050] By “B-lymphocyte antigen CD19 (CD19) polypeptide” is meant a protein having at least about 85% amino acid sequence identity to GenBank Accession No.: AAB60697.1, which is provided below, or a fragment thereof having immunomodulatory activity.

>AAB60697.1 CD19 [Homo sapiens]

(SEQ ID NO: 438)
[sequence omitted]

[0051] By “B-lymphocyte antigen CD19 (CD19) polynucleotide” is meant a polynucleotide encoding a CD19 polypeptide, as well as the introns, exons, 3′ untranslated regions, 5′ untranslated regions, and regulatory sequences associated with its expression, or fragments thereof. In embodiments, a CD19 polynucleotide is the genomic sequence, cDNA, mRNA, or gene associated with and/or required for CD19 expression. An exemplary CD19 nucleic acid sequence is provided below (GenBank Accession No. AH005421.2:331-421,665-931,1230-1433,1554-1829,2057-2167,2769-2817,3128-3216,3591-3704,3896-4000,4174-4242,4343-4399,4488-4544,4813-4905,5231-5322).

>AH005421.2:331-421,665-931,1230-1433,1554-1829,2057-2167,2769-2817,3128-3216,3591-3704,3896-4000,4174-4242,4343-4399,4488-4544,4813-4905,5231-5322 Homo sapiens CD19 (CD19) Gene, Complete Cds

[0052] ATGCCACCTCCTCGCCTCCTCTTCTTCCTCCTCTTCCTCACCCCCATGGAAGTCAGGCCCGAGG AACCTCTAGTGGTGAAGGTGGAAGGTGAGGGAGATAACGCTGTGCTGCAGTGCCTCAAGGGGAC CTCAGATGGCCCCACTCAGCAGCTGACCTGGTCTCGGGAGTCCCCGCTTAAACCCTTCTTAAAA CTCAGCCTGGGGCTGCCAGGCCTGGGAATCCACATGAGGCCCCTGGCATCCTGGCTTTTCATCT TCAACGTCTCTCAACAGATGGGGGGCTTCTACCTGTGCCAGCCGGGGCCCCCCTCTGAGAAGGC CTGGCAGCCTGGCTGGACAGTCAATGTGGAGGGCAGCGGGGAGCTGTTCCGGTGGAATGTTTCG GACCTAGGTGGCCTGGGCTGTGGCCTGAAGAACAGGTCCTCAGAGGGCCCCAGCTCCCCTTCCG GGAAGCTCATGAGCCCCAAGCTGTATGTGTGGGCCAAAGACCGCCCTGAGATCTGGGAGGGAGA GCCTCCGTGTGTCCCACCGAGGGACAGCCTGAACCAGAGCCTCAGCCAGGACCTCACCATGGCC CCTGGCTCCACACTCTGGCTGTCCTGTGGGGTACCCCCTGACTCTGTGTCCAGGGGCCCCCTCT CCTGGACCCATGTGCACCCCAAGGGGCCTAAGTCATTGCTGAGCCTAGAGCTGAAGGACGATCG CCCGGCCAGAGATATGTGGGTAATGGAGACGGGTCTGTTGTTGCCCCGGGCCACAGCTCAAGAC GCTGGAAAGTATTATTGTCACCGTGGCAACCTGACCATGTCATTCCACCTGGAGATCACTGCTC GGCCAGTACTATGGCACTGGCTGCTGAGGACTGGTGGCTGGAAGGTCTCAGCTGTGACTTTGGC TTATCTGATCTTCTGCCTGTGTTCCCTTGTGGGCATTCTTCATCTTCAAAGAGCCCTGGTCCTG AGGAGGAAAAGAAAGCGAATGACTGACCCCACCAGGAGATTCTTCAAAGTGACGCCTCCCCCAG GAAGCGGGCCCCAGAACCAGTACGGGAACGTGCTGTCTCTCCCCACACCCACCTCAGGCCTCGG ACGCGCCCAGCGTTGGGCCGCAGGCCTGGGGGGCACTGCCCCGTCTTATGGAAACCCGAGCAGC GACGTCCAGGCGGATGGAGCCTTGGGGTCCCGGAGCCCGCCGGGAGTGGGCCCAGAAGAAGAGG AAGGGGAGGGCTATGAGGAACCTGACAGTGAGGAGGACTCCGAGTTCTATGAGAACGACTCCAA CCTTGGGCAGGACCAGCTCTCCCAGGATGGCAGCGGCTACGAGAACCCTGAGGATGAGCCCCTG GGTCCTGAGGATGAAGACTCCTTCTCCAACGCTGAGTCTTATGAGAACGAGGATGAAGAGCTGA CCCAGCCGGTCGCCAGGACAATGGACTTCCTGAGCCCTCATGGGTCAGCCTGGGACCCCAGCCG GGAAGCAACCTCCCTGGGGTCCCAGTCCTATGAGGATATGAGAGGAATCCTGTATGCAGCCCCC CAGCTCCGCTCCATTCGGGGCCAGCCTGGACCCAATCATGAGGAAGATGCAGACTCTTATGAGA ACATGGATAATCCCGATGGGCCAGACCCAGCCTGGGGAGGAGGGGGCCGCATGGGCACCTGGAG CACCAGGTGA (SEQ ID NO: 439). An exemplary CD19 gene sequence is provided at ENSEMBL Accession No. ENSG00000177455 (SEQ ID NO: 440).

[0053] By “cluster of differentiation 20 (CD20) polypeptide” is meant a protein having at least about 85% amino acid sequence identity to NCBI Ref. Seq. Accession No. NP_690606.1, provided below, or fragment thereof and having immunomodulatory activity.

>NP_690606.1 B-Lymphocyte Antigen CD20 [Homo sapiens]

(SEQ ID NO: 441)
MTTPRNSVNGTFPAEPMKGPIAMQSGPKPLFRRMSSLVGPTQSFFMRES
KTLGAVQIMNGLFHIALGGLLMIPAGIYAPICVTVWYPLWGGIMYIISG
SLLAATEKNSRKCLVKGKMIMNSLSLFAAISGMILSIMDILNIKISHFL
KMESLNFIRAHTPYINIYNCEPANPSEKNSPSTQYCYSIQSLFLGILSV
MLIFAFFQELVIAGIVENEWKRTCSRPKSNIVLLSAEEKKEQTIEIKEE
VVGLTETSSQPKNEEDIEIIPIQEEEEEETETNFPEPPQDQESSPIEND
SSP.

[0054] By “cluster of differentiation 20 (CD20) polynucleotide” is meant a polynucleotide encoding a CD20 polypeptide, as well as the introns, exons, 3′ untranslated regions, 5′ untranslated regions, and regulatory sequences associated with its expression, or fragments thereof. In embodiments, a CD20 polynucleotide is the genomic sequence, cDNA, mRNA, or gene associated with and/or required for CD20 expression. An exemplary CD20 nucleic acid sequence is provided below (NCBI Ref. Seq. Accession No. NM_152867.2:290-1183). (SEQ ID NO: 442).

>NM_152867.2:290-1183 Homo sapiens Membrane Spanning 4-Domains A1 (MS4A1), Transcript Variant 2, mRNA

(SEQ ID NO: 443)
ATGACAACACCCAGAAATTCAGTAAATGGGACTTTCCCGGCAGAGCCAATGAAAGGCCCTATTG
CTATGCAATCTGGTCCAAAACCACTCTTCAGGAGGATGTCTTCACTGGTGGGCCCCACGCAAAG
CTTCTTCATGAGGGAATCTAAGACTTTGGGGGCTGTCCAGATTATGAATGGGCTCTTCCACATT
GCCCTGGGGGGTCTTCTGATGATCCCAGCAGGGATCTATGCACCCATCTGTGTGACTGTGTGGT
ACCCTCTCTGGGGAGGCATTATGTATATTATTTCCGGATCACTCCTGGCAGCAACGGAGAAAAA
CTCCAGGAAGTGTTTGGTCAAAGGAAAAATGATAATGAATTCATTGAGCCTCTTTGCTGCCATT
TCTGGAATGATTCTTTCAATCATGGACATACTTAATATTAAAATTTCCCATTTTTTAAAAATGG
AGAGTCTGAATTTTATTAGAGCTCACACACCATATATTAACATATACAACTGTGAACCAGCTAA
TCCCTCTGAGAAAAACTCCCCATCTACCCAATACTGTTACAGCATACAATCTCTGTTCTTGGGC
ATTTTGTCAGTGATGCTGATCTTTGCCTTCTTCCAGGAACTTGTAATAGCTGGCATCGTTGAGA
ATGAATGGAAAAGAACGTGCTCCAGACCCAAATCTAACATAGTTCTCCTGTCAGCAGAAGAAAA
AAAAGAACAGACTATTGAAATAAAAGAAGAAGTGGTTGGGCTAACTGAAACATCTTCCCAACCA
AAGAATGAAGAAGACATTGAAATTATTCCAATCCAAGAAGAGGAAGAAGAAGAAACAGAGACGA
ACTTTCCAGAACCTCCCCAAGATCAGGAATCCTCACCAATAGAAAATGACAGCTCTCCTTAA.

[0055] By “cluster of differentiation 34 (CD34) polypeptide” is meant a protein having at least about 85% amino acid sequence identity to GenBank Accession No. AAA03181.1, provided below, or fragment thereof and having immunomodulatory activity.

>AAA03181.1 CD34 [Homo sapiens]

(SEQ ID NO: 444)
[sequence omitted]

[0056] By “cluster of differentiation 34 (CD34) polynucleotide” is meant a polynucleotide encoding a CD34 polypeptide, as well as the introns, exons, 3′ untranslated regions, 5′ untranslated regions, and regulatory sequences associated with its expression, or fragments thereof. In embodiments, an CD34 polynucleotide is the genomic sequence, cDNA, RNA, or gene associated with and/or required for CD34 expression. An exemplary CD34 nucleic acid sequence is provided below (GenBank Accession No. M81104.1:294-1415).

>M81104.1:294-1415 Homo sapiens CD34 mRNA, Complete Cds

(SEQ ID NO: 445)
ATGCCGCGGGGCTGGACCGCGCTTTGCTTGCTGAGTTTGCTGCCTTCTGGGTTCATGAGTCTTG
ACAACAACGGTACTGCTACCCCAGAGTTACCTACCCAGGGAACATTTTCAAATGTTTCTACAAA
TGTATCCTACCAAGAAACTACAACACCTAGTACCCTTGGAAGTACCAGCCTGCACCCTGTGTCT
CAACATGGCAATGAGGCCACAACAAACATCACAGAAACGACAGTCAAATTCACATCTACCTCTG
TGATAACCTCAGTTTATGGAAACACAAACTCTTCTGTCCAGTCACAGACCTCTGTAATCAGCAC
AGTGTTCACCACCCCAGCCAACGTTTCAACTCCAGAGACAACCTTGAAGCCTAGCCTGTCACCT
GGAAATGTTTCAGACCTTTCAACCACTAGCACTAGCCTTGCAACATCTCCCACTAAACCCTATA
CATCATCTTCTCCTATCCTAAGTGACATCAAGGCAGAAATCAAATGTTCAGGCATCAGAGAAGT
GAAATTGACTCAGGGCATCTGCCTGGAGCAAAATAAGACCTCCAGCTGTGCGGAGTTTAAGAAG
GACAGGGGAGAGGGCCTGGCCCGAGTGCTGTGTGGGGAGGAGCAGGCTGATGCTGATGCTGGGG
CCCAGGTATGCTCCCTGCTCCTTGCCCAGTCTGAGGTGAGGCCTCAGTGTCTACTGCTGGTCTT
GGCCAACAGAACAGAAATTTCCAGCAAACTCCAACTTATGAAAAAGCACCAATCTGACCTGAAA
AAGCTGGGGATCCTAGATTTCACTGAGCAAGATGTTGCAAGCCACCAGAGCTATTCCCAAAAGA
CCCTGATTGCACTGGTCACCTCGGGAGCCCTGCTGGCTGTCTTGGGCATCACTGGCTATTTCCT
GATGAATCGCCGCAGCTGGAGCCCCACAGGAGAAAGGCTGGGCGAAGACCCTTATTACACGGAA
AACGGTGGAGGCCAGGGCTATAGCTCAGGACCTGGGACCTCCCCTGAGGCTCAGGGAAAGGCCA
GTGTGAACCGAGGGGCTCAGAAAAACGGGACCGGCCAGGCCACCTCCAGAAACGGCCATTCAGC
AAGACAACACGTGGTGGCTGATACCGAATTGTGA.

[0057] By “Intercellular Adhesion Molecule 1 (ICAM1)” or “Cluster of Differentiation 54 (CD54) polypeptide” is meant a protein having at least about 85% amino acid sequence identity to GenBank Accession No. AAA52709.1, or a fragment thereof that functions in the immune system.

[0058] By “Cluster of Differentiation 54 (CD54) polynucleotide” is meant a nucleic acid molecule encoding an CD54 polypeptide, as well as the introns, exons, 3′ untranslated regions, 5′ untranslated regions, and regulatory sequences associated with its expression, or fragments thereof. An exemplary CD54 polynucleotide is provided at GenBank Accession No. J03132.1. The CD54 gene corresponds to Ensembl: ENSG00000090339.

[0059] By “Cluster of Differentiation 58 (CD58) polypeptide” is meant a protein having at least about 85% amino acid sequence identity to NCBI Reference Sequence Accession No. NP_001770.1, or a fragment thereof that functions in the immune system. CD58 and the immunobiology thereof is described in Zhang, et al. “CD58 Immunobiology at a Glance,” Frontiers in Immunology, vol. 12, article 705260 (2021), the disclosure of which is incorporated herein by reference in its entirety for all purposes.

[0060] By “Cluster of Differentiation 58 (CD58) polynucleotide” is meant a nucleic acid molecule encoding an CD58 polypeptide, as well as the introns, exons, 3′ untranslated regions, 5′ untranslated regions, and regulatory sequences associated with its expression, or fragments thereof. An exemplary CD58 polynucleotide is provided at NCBI Accession No. NM_001779.3. The CD58 gene corresponds to Ensembl: ENSG00000116815.

[0061] By “class II, major histocompatibility complex, transactivator (CIITA) polypeptide” is meant a protein having at least about 85% amino acid sequence identity to NCBI Accession No. NP_001273331.1, which is provided below, or a fragment thereof having DNA binding activity.

>NP 001273331.1 MHC Class II Transactivator Isoform 1 [Homo sapiens]

(SEQ ID NO: 446)
MRCLAPRPAGSYLSEPQGSSQCATMELGPLEGGYLELLNSDADPLCLYHFYDQMDLAGEEEIEL
YSEPDTDTINCDQFSRLLCDMEGDEETREAYANIAELDQYVFQDSQLEGLSKDIFIEHIGPDEV
IGESMEMPAEVGQKSQKRPFPEELPADLKHWKPAEPPTVVTGSLLVGPVSDCSTLPCLPLPALF
NQEPASGQMRLEKTDQIPMPFSSSSLSCLNLPEGPIQFVPTISTLPHGLWQISEAGTGVSSIFI
YHGEVPQASQVPPPSGFTVHGLPTSPDRPGSTSPFAPSATDLPSMPEPALTSRANMTEHKTSPT
QCPAAGEVSNKLPKWPEPVEQFYRSLQDTYGAEPAGPDGILVEVDLVQARLERSSSKSLERELA
TPDWAERQLAQGGLAEVLLAAKEHRRPRETRVIAVLGKAGQGKSYWAGAVSRAWACGRLPQYDF
VFSVPCHCLNRPGDAYGLQDLLFSLGPQPLVAADEVFSHILKRPDRVLLILDGFEELEAQDGFL
HSTCGPAPAEPCSLRGLLAGLFQKKLLRGCTLLLTARPRGRLVQSLSKADALFELSGFSMEQAQ
AYVMRYFESSGMTEHQDRALTLLRDRPLLLSHSHSPTLCRAVCQLSEALLELGEDAKLPSTLTG
LYVGLLGRAALDSPPGALAELAKLAWELGRRHQSTLQEDQFPSADVRTWAMAKGLVQHPPRAAE
SELAFPSFLLQCFLGALWLALSGEIKDKELPQYLALTPRKKRPYDNWLEGVPRFLAGLIFQPPA
RCLGALLGPSAAASVDRKQKVLARYLKRLQPGTLRARQLLELLHCAHEAEEAGIWQHVVQELPG
RLSFLGTRLTPPDAHVLGKALEAAGQDFSLDLRSTGICPSGLGSLVGLSCVTRFRAALSDTVAL
WESLQQHGETKLLQAAEEKFTIEPFKAKSLKDVEDLGKLVQTQRTRSSSEDTAGELPAVRDLKK
LEFALGPVSGPQAFPKLVRILTAFSSLQHLDLDALSENKIGDEGVSQLSATFPQLKSLETLNLS
QNNITDLGAYKLAEALPSLAASLLRLSLYNNCICDVGAESLARVLPDMVSLRVMDVQYNKFTAA
GAQQLAASLRRCPHVETLAMWTPTIPFSVQEHLQQQDSRISLR.

[0062] By “class II, major histocompatibility complex, transactivator (CIITA) polynucleotide” is meant a nucleic acid molecule encoding an CIITA polypeptide, as well as the introns, exons, 3′ untranslated regions, 5′ untranslated regions, and regulatory sequences associated with its expression, or fragments thereof. An exemplary CIITA polynucleotide is provided at NCBI Accession No. NM_001286402.1, which is provide below.

>NM_001286402.1 Homo sapiens Class II Major Histocompatibility Complex Transactivator (CIITA), Transcript Variant 1, mRNA

(SEQ ID NO: 447)
GGTTAGTGATGAGGCTAGTGATGAGGCTGTGTGCTTCTGAGCTGGGCATCCGAAGGCATCCTTG
GGGAAGCTGAGGGCACGAGGAGGGGCTGCCAGACTCCGGGAGCTGCTGCCTGGCTGGGATTCCT
ACACAATGCGTTGCCTGGCTCCACGCCCTGCTGGGTCCTACCTGTCAGAGCCCCAAGGCAGCTC
ACAGTGTGCCACCATGGAGTTGGGGCCCCTAGAAGGTGGCTACCTGGAGCTTCTTAACAGCGAT
GCTGACCCCCTGTGCCTCTACCACTTCTATGACCAGATGGACCTGGCTGGAGAAGAAGAGATTG
AGCTCTACTCAGAACCCGACACAGACACCATCAACTGCGACCAGTTCAGCAGGCTGTTGTGTGA
CATGGAAGGTGATGAAGAGACCAGGGAGGCTTATGCCAATATCGCGGAACTGGACCAGTATGTC
TTCCAGGACTCCCAGCTGGAGGGCCTGAGCAAGGACATTTTCATAGAGCACATAGGACCAGATG
AAGTGATCGGTGAGAGTATGGAGATGCCAGCAGAAGTTGGGCAGAAAAGTCAGAAAAGACCCTT
CCCAGAGGAGCTTCCGGCAGACCTGAAGCACTGGAAGCCAGCTGAGCCCCCCACTGTGGTGACT
GGCAGTCTCCTAGTGGGACCAGTGAGCGACTGCTCCACCCTGCCCTGCCTGCCACTGCCTGCGC
TGTTCAACCAGGAGCCAGCCTCCGGCCAGATGCGCCTGGAGAAAACCGACCAGATTCCCATGCC
TTTCTCCAGTTCCTCGTTGAGCTGCCTGAATCTCCCTGAGGGACCCATCCAGTTTGTCCCCACC
ATCTCCACTCTGCCCCATGGGCTCTGGCAAATCTCTGAGGCTGGAACAGGGGTCTCCAGTATAT
TCATCTACCATGGTGAGGTGCCCCAGGCCAGCCAAGTACCCCCTCCCAGTGGATTCACTGTCCA
CGGCCTCCCAACATCTCCAGACCGGCCAGGCTCCACCAGCCCCTTCGCTCCATCAGCCACTGAC
CTGCCCAGCATGCCTGAACCTGCCCTGACCTCCCGAGCAAACATGACAGAGCACAAGACGTCCC
CCACCCAATGCCCGGCAGCTGGAGAGGTCTCCAACAAGCTTCCAAAATGGCCTGAGCCGGTGGA
GCAGTTCTACCGCTCACTGCAGGACACGTATGGTGCCGAGCCCGCAGGCCCGGATGGCATCCTA
GTGGAGGTGGATCTGGTGCAGGCCAGGCTGGAGAGGAGCAGCAGCAAGAGCCTGGAGCGGGAAC
TGGCCACCCCGGACTGGGCAGAACGGCAGCTGGCCCAAGGAGGCCTGGCTGAGGTGCTGTTGGC
TGCCAAGGAGCACCGGCGGCCGCGTGAGACACGAGTGATTGCTGTGCTGGGCAAAGCTGGTCAG
GGCAAGAGCTATTGGGCTGGGGCAGTGAGCCGGGCCTGGGCTTGTGGCCGGCTTCCCCAGTACG
ACTTTGTCTTCTCTGTCCCCTGCCATTGCTTGAACCGTCCGGGGGATGCCTATGGCCTGCAGGA
TCTGCTCTTCTCCCTGGGCCCACAGCCACTCGTGGCGGCCGATGAGGTTTTCAGCCACATCTTG
AAGAGACCTGACCGCGTTCTGCTCATCCTAGACGGCTTCGAGGAGCTGGAAGCGCAAGATGGCT
TCCTGCACAGCACGTGCGGACCGGCACCGGCGGAGCCCTGCTCCCTCCGGGGGCTGCTGGCCGG
CCTTTTCCAGAAGAAGCTGCTCCGAGGTTGCACCCTCCTCCTCACAGCCCGGCCCCGGGGCCGC
CTGGTCCAGAGCCTGAGCAAGGCCGACGCCCTATTTGAGCTGTCCGGCTTCTCCATGGAGCAGG
CCCAGGCATACGTGATGCGCTACTTTGAGAGCTCAGGGATGACAGAGCACCAAGACAGAGCCCT
GACGCTCCTCCGGGACCGGCCACTTCTTCTCAGTCACAGCCACAGCCCTACTTTGTGCCGGGCA
GTGTGCCAGCTCTCAGAGGCCCTGCTGGAGCTTGGGGAGGACGCCAAGCTGCCCTCCACGCTCA
CGGGACTCTATGTCGGCCTGCTGGGCCGTGCAGCCCTCGACAGCCCCCCCGGGGCCCTGGCAGA
GCTGGCCAAGCTGGCCTGGGAGCTGGGCCGCAGACATCAAAGTACCCTACAGGAGGACCAGTTC
CCATCCGCAGACGTGAGGACCTGGGCGATGGCCAAAGGCTTAGTCCAACACCCACCGCGGGCCG
CAGAGTCCGAGCTGGCCTTCCCCAGCTTCCTCCTGCAATGCTTCCTGGGGGCCCTGTGGCTGGC
TCTGAGTGGCGAAATCAAGGACAAGGAGCTCCCGCAGTACCTAGCATTGACCCCAAGGAAGAAG
AGGCCCTATGACAACTGGCTGGAGGGCGTGCCACGCTTTCTGGCTGGGCTGATCTTCCAGCCTC
CCGCCCGCTGCCTGGGAGCCCTACTCGGGCCATCGGCGGCTGCCTCGGTGGACAGGAAGCAGAA
GGTGCTTGCGAGGTACCTGAAGCGGCTGCAGCCGGGGACACTGCGGGCGCGGCAGCTGCTGGAG
CTGCTGCACTGCGCCCACGAGGCCGAGGAGGCTGGAATTTGGCAGCACGTGGTACAGGAGCTCC
CCGGCCGCCTCTCTTTTCTGGGCACCCGCCTCACGCCTCCTGATGCACATGTACTGGGCAAGGC
CTTGGAGGCGGCGGGCCAAGACTTCTCCCTGGACCTCCGCAGCACTGGCATTTGCCCCTCTGGA
TTGGGGAGCCTCGTGGGACTCAGCTGTGTCACCCGTTTCAGGGCTGCCTTGAGCGACACGGTGG
CGCTGTGGGAGTCCCTGCAGCAGCATGGGGAGACCAAGCTACTTCAGGCAGCAGAGGAGAAGTT
CACCATCGAGCCTTTCAAAGCCAAGTCCCTGAAGGATGTGGAAGACCTGGGAAAGCTTGTGCAG
ACTCAGAGGACGAGAAGTTCCTCGGAAGACACAGCTGGGGAGCTCCCTGCTGTTCGGGACCTAA
AGAAACTGGAGTTTGCGCTGGGCCCTGTCTCAGGCCCCCAGGCTTTCCCCAAACTGGTGCGGAT
CCTCACGGCCTTTTCCTCCCTGCAGCATCTGGACCTGGATGCGCTGAGTGAGAACAAGATCGGG
GACGAGGGTGTCTCGCAGCTCTCAGCCACCTTCCCCCAGCTGAAGTCCTTGGAAACCCTCAATC
TGTCCCAGAACAACATCACTGACCTGGGTGCCTACAAACTCGCCGAGGCCCTGCCTTCGCTCGC
TGCATCCCTGCTCAGGCTAAGCTTGTACAATAACTGCATCTGCGACGTGGGAGCCGAGAGCTTG
GCTCGTGTGCTTCCGGACATGGTGTCCCTCCGGGTGATGGACGTCCAGTACAACAAGTTCACGG
CTGCCGGGGCCCAGCAGCTCGCTGCCAGCCTTCGGAGGTGTCCTCATGTGGAGACGCTGGCGAT
GTGGACGCCCACCATCCCATTCAGTGTCCAGGAACACCTGCAACAACAGGATTCACGGATCAGC
CTGAGATGATCCCAGCTGTGCTCTGGACAGGCATGTTCTCTGAGGACACTAACCACGCTGGACC
TTGAACTGGGTACTTGTGGACACAGCTCTTCTCCAGGCTGTATCCCATGAGCCTCAGCATCCTG
GCACCCGGCCCCTGCTGGTTCAGGGTTGGCCCCTGCCCGGCTGCGGAATGAACCACATCTTGCT
CTGCTGACAGACACAGGCCCGGCTCCAGGCTCCTTTAGCGCCCAGTTGGGTGGATGCCTGGTGG
CAGCTGCGGTCCACCCAGGAGCCCCGAGGCCTTCTCTGAAGGACATTGCGGACAGCCACGGCCA
GGCCAGAGGGAGTGACAGAGGCAGCCCCATTCTGCCTGCCCAGGCCCCTGCCACCCTGGGGAGA
AAGTACTTCTTTTTTTTTATTTTTAGACAGAGTCTCACTGTTGCCCAGGCTGGCGTGCAGTGGT
GCGATCTGGGTTCACTGCAACCTCCGCCTCTTGGGTTCAAGCGATTCTTCTGCTTCAGCCTCCC
GAGTAGCTGGGACTACAGGCACCCACCATCATGTCTGGCTAATTTTTCATTTTTAGTAGAGACA
GGGTTTTGCCATGTTGGCCAGGCTGGTCTCAAACTCTTGACCTCAGGTGATCCACCCACCTCAG
CCTCCCAAAGTGCTGGGATTACAAGCGTGAGCCACTGCACCGGGCCACAGAGAAAGTACTTCTC
CACCCTGCTCTCCGACCAGACACCTTGACAGGGCACACCGGGCACTCAGAAGACACTGATGGGC
AACCCCCAGCCTGCTAATTCCCCAGATTGCAACAGGCTGGGCTTCAGTGGCAGCTGCTTTTGTC
TATGGGACTCAATGCACTGACATTGTTGGCCAAAGCCAAAGCTAGGCCTGGCCAGATGCACCAG
CCCTTAGCAGGGAAACAGCTAATGGGACACTAATGGGGCGGTGAGAGGGGAACAGACTGGAAGC
ACAGCTTCATTTCCTGTGTCTTTTTTCACTACATTATAAATGTCTCTTTAATGTCACAGGCAGG
TCCAGGGTTTGAGTTCATACCCTGTTACCATTTTGGGGTACCCACTGCTCTGGTTATCTAATAT
GTAACAAGCCACCCCAAATCATAGTGGCTTAAAACAACACTCACATTTA.

An exemplary CIITA gene sequence is provided at (SEQ ID NO: 448).

[0063] By “FK506-binding protein 1A (FKBP1A) polypeptide” is meant a protein having at least about 85% amino acid sequence identity to GenBank Accession No. AAA35844.1, which is provided below, or a fragment thereof having cis-trans prolyl isomerase activity and/or having FK506 (tacrolimus), rapamycin, or other immunosuppressant agent binding activity.

>AAA35844.1 FK506-Binding Protein (FKBP) [Homo sapiens]

(SEQ ID NO: 449)
MGVQVETISPGDGRTFPKRGQTCVVHYTGMLEDGKKFDSSRDRNKPFKFM
LGKQEVIRGWEEGVAQMSVGQRAKLTISPDYAYGATGHPGIIPPHATLVF
DVELLKLE.

[0064] By “FK506-binding protein 1A (FKBP1A) polynucleotide” is meant a nucleic acid molecule encoding an FKBP1A polypeptide, as well as the introns, exons, 3′ untranslated regions, 5′ untranslated regions, and regulatory sequences associated with its expression, or fragments thereof. An exemplary FKBP1A polynucleotide sequence is provided at GenBank Accession No. M34539.1:79-405, which is provided below.

>M34539.1:79-405 Human FK506-Binding Protein (FKBP) mRNA, Complete Cds

[0065] ATGGGAGTGCAGGTGGAAACCATCTCCCCAGGAGACGGGCGCACCTTCCCCAAGCGCGGCCAGA CCTGCGTGGTGCACTACACCGGGATGCTTGAAGATGGAAAGAAATTTGATTCCTCCCGGGACAG AAACAAGCCCTTTAAGTTTATGCTAGGCAAGCAGGAGGTGATCCGAGGCTGGGAAGAAGGGGTT GCCCAGATGAGTGTGGGTCAGAGAGCCAAACTGACTATATCTCCAGATTATGCCTATGGTGCCA CTGGGCACCCAGGCATCATCCCACCACATGCCACTCTCGTCTTCGATGTGGAGCTTCTAAAACT GGAATGA (SEQ ID NO: 450). An exemplary FKBP1A gene sequence is provided at Ensembl Accession No. ENSG00000088832 (SEQ ID NO: 426).

[0066] By “granzyme B (GZMB) polypeptide” is meant a protein having at least about 85% amino acid sequence identity to GenBank accession No. AAA75490.1, which is provided below, or a fragment thereof having immunomodulatory activity.

>AAA75490.1 Granzyme B [Homo sapiens]

(SEQ ID NO: 451)
[sequence omitted]

[0067] By “granzyme B (GZMB) polynucleotide” is meant a nucleic acid molecule encoding an GZMB polypeptide, as well as the introns, exons, 3′ untranslated regions, 5′ untranslated regions, and regulatory sequences associated with its expression, or fragments thereof. An exemplary GZMB polynucleotide sequence is provided below (GenBank Accession No. M28879.1:1161-1215,2256-2403,2857-2992,3200-3460,4105-4248).

### >M28879.1:1161-1215,2256-2403,2857-2992,3200-3460,4105-4248 Human Granzyme B (CTLA-1) Gene, Complete Cds

[0068] ATGCAACCAATCCTGCTTCTGCTGGCCTTCCTCCTGCTGCCCAGGGCAGATGCAGGGGAGATCA TCGGGGGACATGAGGCCAAGCCCCACTCCCGCCCCTACATGGCTTATCTTATGATCTGGGATCA GAAGTCTCTGAAGAGGTGCGGTGGCTTCCTGATACAAGACGACTTCGTGCTGACAGCTGCTCAC TGTTGGGGAAGCTCCATAAATGTCACCTTGGGGGCCCACAATATCAAGGAACAGGAGCCGACCC AGCAGTTTATCCCTGTGAAAAGAGCCATCCCCCATCCAGCCTATAATCCTAAGAACTTCTCCAA TGACATCATGCTACTGCAGCTGGAGAGAAAGGCCAAGCGGACCAGAGCTGTGCAGCCCCTCAGG CTACCTAGCAACAAGGCCCAGGTGAAGCCAGGGCAGACATGCAGTGTGGCCGGCTGGGGGCAGA CGGCCCCCCTGGGAAAACACTCACACACACTACAAGAGGTGAAGATGACAGTGCAGGAAGATCG AAAGTGCGAATCTGACTTACGCCATTATTACGACAGTACCATTGAGTTGTGCGTGGGGGACCCA GAGATTAAAAAGACTTCCTTTAAGGGGGACTCTGGAGGCCCTCTTGTGTGTAACAAGGTGGCCC AGGGCATTGTCTCCTATGGACGAAACAATGGCATGCCTCCACGAGCCTGCACCAAAGTCTCAAG CTTTGTACACTGGATAAAGAAAACCATGAAACGCTACTAA (SEQ ID NO: 452). An exemplary human GZMB polynucleotide sequence is provided at Ensembl Accession No. ENSG00000100453 (SEQ ID NO: 453).

[0069] By “interferon gamma (IFN-G) polypeptide” is meant a protein having at least about 85% amino acid sequence identity to GenBank accession No. CAA44325.1, which is provided below, or a functional fragment thereof having immunomodulatory activity.

>CAA44325.1 Interferon-Gamma [Homo sapiens]

(SEQ ID NO: 454)
[sequence omitted]

[0070] By “interferon gamma (IFN-G; INFg) polynucleotide” is meant a nucleic acid molecule encoding an IFN-G polypeptide, as well as the introns, exons, 3′ untranslated regions, 5′ untranslated regions, and regulatory sequences associated with its expression, or fragments thereof. An exemplary INFg polynucleotide sequence is provided below (GenBank Accession No. X62468.1:13-447).

>X62468.1:13-447 H. sapiens mRNA for IFN-Gamma (pKC-0)

[0071] ATGCAAGACCCATATGTAAAAGAAGCAGAAAACCTTAAGAAATATTTTAATGCAGGTCATTCAG ATGTAGCGGATAATGGAACTCTTTTCTTAGGCATTTTGAAGAATTGGAAAGAGGAGAGTGACAG AAAAATAATGCAGAGCCAAATTGTCTCCTTTTACTTCAAACTTTTTAAAAACTTTAAAGATGAC CAGAGCATCCAAAAGAGTGTGGAGACCATCAAGGAAGACATGAATGTCAAGTTTTTCAATAGCA ACAAAAAGAAACGAGATGACTTCGAAAAGCTGACTAATTATTCGGTAACTGACTTGAATGTCCA ACGCAAAGCAATACATGAACTCATCCAAGTGATGGCTGAACTGTCGCCAGCAGCTAAAACAGGG AAGCGAAAAAGGAGTCAGATGCTGTTTCGAGGTCGAAGAGCATCCCAGTAA (SEQ ID NO: 455). An exemplary human IFN-G polynucleotide sequence is provided at Ensembl Accession No. ENSG00000111537 (SEQ ID NO: 456).

[0072] By “interleukin-2 (IL-2) polypeptide” is meant a protein having at least about 85% amino acid sequence identity to GenBank Accession No. CAA23827.1, provided below, or fragment thereof, and having immunomodulatory activity.

>CAA23827.1 Interleukin-2 [Homo sapiens]

(SEQ ID NO: 457)
MYRMQLLSCIALSLALVTNSAPTSSSTKKTQLQLEHLLLDLQMILNGINN
YKNPKLTRMLTFKFYMPKKATELKHLQCLEEELKPLEEVLNLAQSKNFHL
RPRDLISNINVIVLELKGSETTFMCEYADETATIVEFLNRWITFCQSIIS
TLT.

[0073] By “interleukin-2 (IL-2) polynucleotide” is meant a polynucleotide encoding an IL-2 polypeptide, as well as the introns, exons, 3′ untranslated regions, 5′ untranslated regions, and regulatory sequences associated with its expression, or fragments thereof. In embodiments, an IL-2 polynucleotide is the genomic sequence, cDNA, mRNA, or gene associated with and/or required for IL-2 expression. An exemplary IL-2 nucleic acid sequence is provided below (GenBank Accession No. V00564.1:48-509).

>V00564.1:48-509 Human mRNA Encoding Interleukin-2 (IL-2) a Lymphocyte Regulatory Molecule

(SEQ ID NO: 458)
ATGTACAGGATGCAACTCCTGTCTTGCATTGCACTAAGTCTTGCACTTGT
CACAAACAGTGCACCTACTTCAAGTTCTACAAAGAAAACACAGCTACAAC
TGGAGCATTTACTGCTGGATTTACAGATGATTTTGAATGGAATTAATAAT
TACAAGAATCCCAAACTCACCAGGATGCTCACATTTAAGTTTTACATGCC
CAAGAAGGCCACAGAACTGAAACATCTTCAGTGTCTAGAAGAAGAACTCA
AACCTCTGGAGGAAGTGCTAAATTTAGCTCAAAGCAAAAACTTTCACTTA
AGACCCAGGGACTTAATCAGCAATATCAACGTAATAGTTCTGGAACTAAA
GGGATCTGAAACAACATTCATGTGTGAATATGCTGATGAGACAGCAACCA
TTGTAGAATTTCTGAACAGATGGATTACCTTTTGTCAAAGCATCATCTCA
ACACTAACTTGA.

[0074] By “nuclear receptor subfamily 3, group C, member 1 (NR3C1) polypeptide” is meant a protein having at least about 85% amino acid sequence identity to GenBank Accession No. CAA26976.1, which is provided below, or a fragment thereof, and capable of binding a steroid drug.

>CAA26976.1 Alpha-Glucocorticoid Receptor [Homo sapiens]

(SEQ ID NO: 459)
MDSKESLTPGREENPSSVLAQERGDVMDFYKTLRGGATVKVSASSPSLAV
ASQSDSKQRRLLVDFPKGSVSNAQQPDLSKAVSLSMGLYMGETETKVMGN
DLGFPQQGQISLSSGETDLKLLEESIANLNRSTSVPENPKSSASTAVSAA
PTEKEFPKTHSDVSSEQQHLKGQTGTNGGNVKLYTTDQSTFDILQDLEFS
SGSPGKETNESPWRSDLLIDENCLLSPLAGEDDSFLLEGNSNEDCKPLIL
PDTKPKIKDNGDLVLSSPSNVTLPQVKTEKEDFIELCTPGVIKQEKLGTV
YCQASFPGANIIGNKMSAISVHGVSTSGGQMYHYDMNTASLSQQQDQKPI
FNVIPPIPVGSENWNRCQGSGDDNLTSLGTLNFPGRTVFSNGYSSPSMRP
DVSSPPSSSSTATTGPPPKLCLVCSDEASGCHYGVLTCGSCKVFFKRAVE
GQHNYLCAGRNDCIIDKIRRKNCPACRYRKCLQAGMNLEARKTKKKIKGI
QQATTGVSQETSENPGNKTIVPATLPQLTPTLVSLLEVIEPEVLYAGYDS
SVPDSTWRIMTTLNMLGGRQVIAAVKWAKAIPGFRNLHLDDQMTLLQYSW
MFLMAFALGWRSYRQSSANLLCFAPDLIINEQRMTLPCMYDQCKHMLYVS
SELHRLQVSYEEYLCMKTLLLLSSVPKDGLKSQELFDEIRMTYIKELGKA
IVKREGNSSQNWQRFYQLTKLLDSMHEVVENLLNYCFQTFLDKTMSIEFP
EMLAEIITNQIPKYSNGNIKKLLFHQK.

[0075] By “nuclear receptor subfamily 3, group C, member 1 (NR3C1) polynucleotide” is meant a nucleic acid molecule encoding an NR3C1 polypeptide, as well as the introns, exons, 3′ untranslated regions, 5′ untranslated regions, and regulatory sequences associated with its expression, or fragments thereof. An exemplary NR3C1 polynucleotide sequence is provided at

GenBank Accession No. X03225.1:133-2466, which is Provided Below.

[0076] >X03225.1:133-2466 Human mRNA for alpha-glucocorticoid receptor (clone OB7)

[0077] ATGGACTCCAAAGAATCATTAACTCCTGGTAGAGAAGAAAACCCCAGCAGTGTGCTTGCTCAGG AGAGGGGAGATGTGATGGACTTCTATAAAACCCTAAGAGGAGGAGCTACTGTGAAGGTTTCTGC GTCTTCACCCTCACTGGCTGTCGCTTCTCAATCAGACTCCAAGCAGCGAAGACTTTTGGTTGAT TTTCCAAAAGGCTCAGTAAGCAATGCGCAGCAGCCAGATCTGTCCAAAGCAGTTTCACTCTCAA TGGGACTGTATATGGGAGAGACAGAAACAAAAGTGATGGGAAATGACCTGGGATTCCCACAGCA GGGCCAAATCAGCCTTTCCTCGGGGGAAACAGACTTAAAGCTTTTGGAAGAAAGCATTGCAAAC CTCAATAGGTCGACCAGTGTTCCAGAGAACCCCAAGAGTTCAGCATCCACTGCTGTGTCTGCTG CCCCCACAGAGAAGGAGTTTCCAAAAACTCACTCTGATGTATCTTCAGAACAGCAACATTTGAA GGGCCAGACTGGCACCAACGGTGGCAATGTGAAATTGTATACCACAGACCAAAGCACCTTTGAC ATTTTGCAGGATTTGGAGTTTTCTTCTGGGTCCCCAGGTAAAGAGACGAATGAGAGTCCTTGGA GATCAGACCTGTTGATAGATGAAAACTGTTTGCTTTCTCCTCTGGCGGGAGAAGACGATTCATT CCTTTTGGAAGGAAACTCGAATGAGGACTGCAAGCCTCTCATTTTACCGGACACTAAACCCAAA ATTAAGGATAATGGAGATCTGGTTTTGTCAAGCCCCAGTAATGTAACACTGCCCCAAGTGAAAA CAGAAAAAGAAGATTTCATCGAACTCTGCACCCCTGGGGTAATTAAGCAAGAGAAACTGGGCAC AGTTTACTGTCAGGCAAGCTTTCCTGGAGCAAATATAATTGGTAATAAAATGTCTGCCATTTCT GTTCATGGTGTGAGTACCTCTGGAGGACAGATGTACCACTATGACATGAATACAGCATCCCTTT CTCAACAGCAGGATCAGAAGCCTATTTTTAATGTCATTCCACCAATTCCCGTTGGTTCCGAAAA TTGGAATAGGTGCCAAGGATCTGGAGATGACAACTTGACTTCTCTGGGGACTCTGAACTTCCCT GGTCGAACAGTTTTTTCTAATGGCTATTCAAGCCCCAGCATGAGACCAGATGTAAGCTCTCCTC CATCCAGCTCCTCAACAGCAACAACAGGACCACCTCCCAAACTCTGCCTGGTGTGCTCTGATGA AGCTTCAGGATGTCATTATGGAGTCTTAACTTGTGGAAGCTGTAAAGTTTTCTTCAAAAGAGCA GTGGAAGGACAGCACAATTACCTATGTGCTGGAAGGAATGATTGCATCATCGATAAAATTCGAA GAAAAAACTGCCCAGCATGCCGCTATCGAAAATGTCTTCAGGCTGGAATGAACCTGGAAGCTCG AAAAACAAAGAAAAAAATAAAAGGAATTCAGCAGGCCACTACAGGAGTCTCACAAGAAACCTCT GAAAATCCTGGTAACAAAACAATAGTTCCTGCAACGTTACCACAACTCACCCCTACCCTGGTGT CACTGTTGGAGGTTATTGAACCTGAAGTGTTATATGCAGGATATGATAGCTCTGTTCCAGACTC AACTTGGAGGATCATGACTACGCTCAACATGTTAGGAGGGCGGCAAGTGATTGCAGCAGTGAAA TGGGCAAAGGCAATACCAGGTTTCAGGAACTTACACCTGGATGACCAAATGACCCTACTGCAGT ACTCCTGGATGTTTCTTATGGCATTTGCTCTGGGGTGGAGATCATATAGACAATCAAGTGCAAA CCTGCTGTGTTTTGCTCCTGATCTGATTATTAATGAGCAGAGAATGACTCTACCCTGCATGTAC GACCAATGTAAACACATGCTGTATGTTTCCTCTGAGTTACACAGGCTTCAGGTATCTTATGAAG AGTATCTCTGTATGAAAACCTTACTGCTTCTCTCTTCAGTTCCTAAGGACGGTCTGAAGAGCCA AGAGCTATTTGATGAAATTAGAATGACCTACATCAAAGAGCTAGGAAAAGCCATTGTCAAGAGG GAAGGAAACTCCAGCCAGAACTGGCAGCGGTTTTATCAACTGACAAAACTCTTGGATTCTATGC ATGAAGTGGTTGAAAATCTCCTTAACTATTGCTTCCAAACATTTTTGGATAAGACCATGAGTAT TGAATTCCCCGAGATGTTAGCTGAAATCATCACCAATCAGATACCAAAATATTCAAATGGAAAT ATCAAAAAACTTCTGTTTCATCAAAAGTGA (SEQ ID NO: 460). An exemplary NR3C1 gene sequence is provided at Ensembl Accession No. ENSG00000113580 (SEQ ID NO: 427).

[0078] By “peptidyl-prolyl isomerase A (PPIA) polypeptide” is meant a protein having at least about 85% amino acid sequence identity to GenBank Accession No. CAA37039.1, which is provided below, or a fragment thereof, and having peptidyl-prolyl cis-trans isomerase activity and/or having cyclosporin binding activity.

>CAA37039.1 Peptidylprolyl Isomerase [Homo sapiens]

(SEQ ID NO: 461)
MVNPTVFFDIAVDGEPLGRVSFELFADKVPKTAENFRALSTGEKGFGYKG
SCFHRIIPGFMCQGGDFTRHNGTGGKSIYGEKFEDENFILKHTGPGILSM
ANAGPNINGSQFFICTAKTEWLDGKHVVFGKVKEGMNIVEAMERFGSRNG
KTSKKITIADCGQLE.

[0079] By “peptidyl-prolyl isomerase A (PPIA) polynucleotide” is meant a nucleic acid molecule encoding an PPIA polypeptide, as well as the introns, exons, 3′ untranslated regions, 5′ untranslated regions, and regulatory sequences associated with its expression, or fragments thereof. An exemplary PPIA polynucleotide sequence is provided at GenBank Accession No. X52851.1:1660-1728,4173-4203,4318-4406,4628-4800,6215-6350, which is provided below.

### >X52851.1:1660-1728,4173-4203,4318-4406,4628-4800,6215-6350 Human Cyclophilin Gene for Cyclophilin (EC 5.2.1.8)

(SEQ ID NO: 462)
ATGGTCAACCCCACCGTGTTCTTCGACATTGCCGTCGACGGCGAGCCCTT
GGGCCGCGTCTCCTTTGAGCTGTTTGCAGACAAGGTCCCAAAGACAGCAG
AAAATTTTCGTGCTCTGAGCACTGGAGAGAAAGGATTTGGTTATAAGGGT
TCCTGCTTTCACAGAATTATTCCAGGGTTTATGTGTCAGGGTGGTGACTT
CACACGCCATAATGGCACTGGTGGCAAGTCCATCTATGGGGAGAAATTTG
AAGATGAGAACTTCATCCTAAAGCATACGGGTCCTGGCATCTTGTCCATG
GCAAATGCTGGACCCAACACAAATGGTTCCCAGTTTTTCATCTGCACTGC
CAAGACTGAGTGGTTGGATGGCAAGCATGTGGTGTTTGGCAAAGTGAAAG
AAGGCATGAATATTGTGGAGGCCATGGAGCGCTTTGGGTCCAGGAATGGC
AAGACCAGCAAGAAGATCACCATTGCTGACTGTGGACAACTCGAATAA.

An exemplary PPIA gene sequence is provided at Ensembl Accession No. ENSG00000196262 (SEQ ID NO: 428).

[0080] By “programmed cell death 1 (PD1) polypeptide” is meant a protein having at least about 85% amino acid sequence identity to GenBank Accession No. AJS10360.1, which is provided below, or a fragment thereof, and having immunomodulatory activity.

>AJS10360.1 Programmed Cell Death 1 Protein [Homo sapiens]

(SEQ ID NO: 463)
MQIPQAPWPVVWAVLQLGWRPGWFLDSPDRPWNPPTFSPALLVVTEGDNA
TFTCSFSNTSESFVLNWYRMSPSNQTDKLAAFPEDRSQPGQDCRFRVTQL
PNGRDFHMSVVRARRNDSGTYLCGAISLAPKAQIKESLRAELRVTERRAE
VPTAHPSPSPRPAGQFQTLVVGVVGGLLGSLVLLVWVLAVICSRAARGTI
GARRTGQPLKEDPSAVPVFSVDYGELDFQWREKTPEPPVPCVPEQTEYAT
IVFPSGMGTSSPARRGSADGPRSAQPLRPEDGHCSWPL.

[0081] By “programmed cell death 1 (PD1) polynucleotide” is meant a nucleic acid molecule encoding a PD1 polypeptide, as well as the introns, exons, 3′ untranslated regions, 5′ untranslated regions, and regulatory sequences associated with its expression, or fragments thereof. An exemplary PD1 polynucleotide sequence is provided at GenBank Accession No. KJ865861.1, which is provided below.

>KJ865861.1 Homo sapiens Cell-Line G3361 Programmed Cell Death 1 Protein (PDCD1) mRNA, Complete Cds

[0082] ATGCAGATCCCACAGGCGCCCTGGCCAGTCGTCTGGGCGGTGCTACAACTGGGCTGGCGGCCAG GATGGTTCTTAGACTCCCCAGACAGGCCCTGGAACCCCCCCACCTTCTCCCCAGCCCTGCTCGT GGTGACCGAAGGGGACAACGCCACCTTCACCTGCAGCTTCTCCAACACATCGGAGAGCTTCGTG CTAAACTGGTACCGCATGAGCCCCAGCAACCAGACGGACAAGCTGGCCGCCTTCCCCGAGGACC GCAGCCAGCCCGGCCAGGACTGCCGCTTCCGTGTCACACAACTGCCCAACGGGCGTGACTTCCA CATGAGCGTGGTCAGGGCCCGGCGCAATGACAGCGGCACCTACCTCTGTGGGGCCATCTCCCTG GCCCCCAAGGCGCAGATCAAAGAGAGCCTGCGGGCAGAGCTCAGGGTGACAGAGAGAAGGGCAG AAGTGCCCACAGCCCACCCCAGCCCCTCACCCAGGCCAGCCGGCCAGTTCCAAACCCTGGTGGT TGGTGTCGTGGGCGGCCTGCTGGGCAGCCTGGTGCTGCTAGTCTGGGTCCTGGCCGTCATCTGC TCCCGGGCCGCACGAGGGACAATAGGAGCCAGGCGCACCGGCCAGCCCCTGAAGGAGGACCCCT CAGCCGTGCCTGTGTTCTCTGTGGACTATGGGGAGCTGGATTTCCAGTGGCGAGAGAAGACCCC GGAGCCCCCCGTGCCCTGTGTCCCTGAGCAGACGGAGTATGCCACCATTGTCTTTCCTAGCGGA ATGGGCACCTCATCCCCCGCCCGCAGGGGCTCAGCCGACGGCCCTCGGAGTGCCCAGCCACTGA GGCCTGAGGATGGACACTGCTCTTGGCCCCTCTGA (SEQ ID NO: 464). An exemplary PD1 polynucleotide sequence is also provided at Ensenbl accession no: ENSG00000188389 (SEQ ID NO: 465).

[0083] By “Tumor necrosis factor alpha (TNFa or TNFa) polypeptide” is meant a protein having at least about 85% amino acid sequence identity to GenBank Accession No. CAA26669.1, provided below, or a fragment thereof, and having immunomodulatory activity.

>CAA26669.1 TNF-Alpha [Homo sapiens]

(SEQ ID NO: 466)
MSTESMIRDVELAEEALPKKTGGPQGSRRCLFLSLFSFLIVAGATTLFCL
LHFGVIGPQREEFPRDLSLISPLAQAVRSSSRTPSDKPVAHVVANPQAEG
QLQWLNRRANALLANGVELRDNQLVVPSEGLYLIYSQVLFKGQGCPSTHV
LLTHTISRIAVSYQTKVNLLSAIKSPCQRETPEGAEAKPWYEPIYLGGVF
QLEKGDRLSAEINRPDYLDFAESGQVYFGIIAL.

[0084] By “Tumor necrosis factor alpha (TNFa or TNFa) polynucleotide” is meant a polynucleotide encoding a Tumor Necrosis Factor Alpha polypeptide, as well as the introns, exons, 3′ untranslated regions, 5′ untranslated regions, and regulatory sequences associated with its expression, or fragments thereof. In embodiments, a Tumor Necrosis Factor Alpha polynucleotide is the genomic sequence, cDNA, mRNA, or gene associated with and/or required for Tumor Necrosis Factor Alpha expression. An exemplary Tumor Necrosis Factor Alpha nucleic acid sequence is provided below (GenBank Accession No. X02910.1:796-981,1589-1634,1822-1869,2171-2592).

### >X02910.1:796-981,1589-1634,1822-1869,2171-2592 Human Gene for Tumor Necrosis Factor (TNF-Alpha)

[0085] ATGAGCACTGAAAGCATGATCCGGGACGTGGAGCTGGCCGAGGAGGCGCTCCCCAAGAAGACAG GGGGGCCCCAGGGCTCCAGGCGGTGCTTGTTCCTCAGCCTCTTCTCCTTCCTGATCGTGGCAGG CGCCACCACGCTCTTCTGCCTGCTGCACTTTGGAGTGATCGGCCCCCAGAGGGAAGAGTTCCCC AGGGACCTCTCTCTAATCAGCCCTCTGGCCCAGGCAGTCAGATCATCTTCTCGAACCCCGAGTG ACAAGCCTGTAGCCCATGTTGTAGCAAACCCTCAAGCTGAGGGGCAGCTCCAGTGGCTGAACCG CCGGGCCAATGCCCTCCTGGCCAATGGCGTGGAGCTGAGAGATAACCAGCTGGTGGTGCCATCA GAGGGCCTGTACCTCATCTACTCCCAGGTCCTCTTCAAGGGCCAAGGCTGCCCCTCCACCCATG TGCTCCTCACCCACACCATCAGCCGCATCGCCGTCTCCTACCAGACCAAGGTCAACCTCCTCTC TGCCATCAAGAGCCCCTGCCAGAGGGAGACCCCAGAGGGGGCTGAGGCCAAGCCCTGGTATGAG CCCATCTATCTGGGAGGGGTCTTCCAGCTGGAGAAGGGTGACCGACTCAGCGCTGAGATCAATC GGCCCGACTATCTCGACTTTGCCGAGTCTGGGCAGGTCTACTTTGGGATCATTGCCCTGTGA (SEQ ID NO: 467). An exemplary TNFa gene sequence is provided at ENSEMBL Accession No. ENSG00000232810 (SEQ ID NO: 468).

[0086] By “T cell receptor alpha chain (TRAC) polypeptide” is meant a protein having at least about 85% amino acid sequence identity to GenBank Accession No.: AAO72258.1, which is provided below, or a fragment thereof, and having immunomodulatory activity.

>AAO72258.1 T Cell Receptor Alpha Chain [Homo sapiens]

(SEQ ID NO: 469)
METLLGVSLVILWLQLARVNSQQGEEDPQALSIQEGENATMNCSYKTSIN
NLQWYRQNSGRGLVHLILIRSNEREKHSGRLRVTLDTSKKSSSLLITASR
AADTASYFCATANAGGTSYGKLTFGQGTILTVHPNIQNPDPAVYQLRDSK
SSDKSVCLFTDFDSQTNVSQSKDSDVYITDKTVLDMRSMDFKSNSAVAWS
NKSDFACANAFNNSIIPEDTFFPSPESSCDVKLVEKSFETDTNLNFQNLS
VIGFRILLLKVAGFNLLMTLRLWSS.

[0087] By “T cell receptor alpha chain (TRAC) polynucleotide” is meant a polynucleotide encoding a TRAC polypeptide, as well as the introns, exons, 3′ untranslated regions, 5′ untranslated regions, and regulatory sequences associated with its expression, or fragments thereof. In embodiments, a TRAC polynucleotide is the genomic sequence, cDNA, mRNA, or gene associated with and/or required for TRAC expression. An exemplary TRAC nucleic acid sequence is provided below (GenBank Accession No. AY247834.1).

>AY247834.1 Homo sapiens T Cell Receptor Alpha Chain (TCRA) mRNA, TCRA-AV17S1 J52 AC Allele, Complete Cds

[0088] ATGGAAACTCTCCTGGGAGTGTCTTTGGTGATTCTATGGCTTCAACTGGCTAGGGTGAACAGTC AACAGGGAGAAGAGGATCCTCAGGCCTTGAGCATCCAGGAGGGTGAAAATGCCACCATGAACTG CAGTTACAAAACTAGTATAAACAATTTACAGTGGTATAGACAAAATTCAGGTAGAGGCCTTGTC CACCTAATTTTAATACGTTCAAATGAAAGAGAGAAACACAGTGGAAGATTAAGAGTCACGCTTG ACACTTCCAAGAAAAGCAGTTCCTTGTTGATCACGGCTTCCCGGGCAGCAGACACTGCTTCTTA CTTCTGTGCTACGGCTAATGCTGGTGGTACTAGCTATGGAAAGCTGACATTTGGACAAGGGACC ATCTTGACTGTCCATCCAAATATCCAGAACCCTGACCCTGCCGTGTACCAGCTGAGAGACTCTA AATCCAGTGACAAGTCTGTCTGCCTATTCACCGATTTTGATTCTCAAACAAATGTGTCACAAAG TAAGGATTCTGATGTGTATATCACAGACAAAACTGTGCTAGACATGAGGTCTATGGACTTCAAG AGCAACAGTGCTGTGGCCTGGAGCAACAAATCTGACTTTGCATGTGCAAACGCCTTCAACAACA GCATTATTCCAGAAGACACCTTCTTCCCCAGCCCAGAAAGTTCCTGTGATGTCAAGCTGGTCGA GAAAAGCTTTGAAACAGATACGAACCTAAACTTTCAAAACCTGTCAGTGATTGGGTTCCGAATC CTCCTCCTGAAAGTGGCCGGGTTTAATCTGCTCATGACGCTGCGGCTGTGGTCCAGCTGA (SEQ ID NO: 470). An exemplary TRAC gene sequence is provided at ENSEMBL Accession No. ENSG00000277734 (SEQ ID NO: 472).

[0089] By “adenine” or “9H-Purin-6-amine” is meant a purine nucleobase with the molecular formula C₅H₅N₅, having the structure

[chemical structure]

and corresponding to CAS No. 73-24-5.

[0090] By “adenosine” or “4-Amino-1-[(2R,3R,4S,5R)-3,4-dihydroxy-5-(hydroxymethyl)oxolan-2-yl]pyrimidin-2(1H)-one” is meant an adenine molecule attached to a ribose sugar via a glycosidic bond, having the structure

[chemical structure]

and corresponding to CAS No. 65-46-3. Its molecular formula is C₁₀H₁₃N₅O₄.

[0091] By “adenosine deaminase” or “adenine deaminase” is meant a polypeptide or fragment thereof capable of catalyzing the hydrolytic deamination of adenine or adenosine. In some embodiments, the deaminase or deaminase domain is an adenosine deaminase catalyzing the hydrolytic deamination of adenosine to inosine or deoxy adenosine to deoxyinosine. In some embodiments, the adenosine deaminase catalyzes the hydrolytic deamination of adenine or adenosine in deoxyribonucleic acid (DNA). The adenosine deaminases (e.g., engineered adenosine deaminases, evolved adenosine deaminases) provided herein may be from any organism (e.g., eukaryotic, prokaryotic), including but not limited to algae, bacteria, fungi, plants, invertebrates (e.g., insects), and vertebrates (e.g., amphibians, mammals). In some embodiments, the adenosine deaminase is an adenosine deaminase variant with one or more alterations and is capable of deaminating both adenine and cytosine in a target polynucleotide (e.g., DNA, RNA) and may be referred to as a “dual deaminase”. Non-limiting examples of dual deaminases include those described in PCT/US22/22050. In some embodiments, the target polynucleotide is single or double stranded. In some embodiments, the adenosine deaminase variant is capable of deaminating both adenine and cytosine in DNA. In some embodiments, the adenosine deaminase variant is capable of deaminating both adenine and cytosine in single-stranded DNA. In some embodiments, the adenosine deaminase variant is capable of deaminating both adenine and cytosine in RNA. In embodiments, the adenosine deaminase variant is selected from those described in PCT/US2020/018192, PCT/US2020/049975, PCT/US2017/045381, and PCT/US2020/028568, the full contents of which are each incorporated herein by reference in their entireties for all purposes.

[0092] By “adenosine deaminase activity” is meant catalyzing the deamination of adenine or adenosine to guanine in a polynucleotide.

[0093] By “Adenosine Base Editor (ABE)” is meant a base editor comprising an adenosine deaminase.

[0094] By “Adenosine Base Editor (ABE) polynucleotide” is meant a polynucleotide encoding an ABE.

[0095] By “Adenosine Base Editor 8 (ABE8) polypeptide” or “ABE8” is meant a base editor as defined herein comprising an adenosine deaminase or adenosine deaminase variant comprising one or more of the alterations listed in Table 5B, one of the combinations of alterations listed in Table 5B, or an alteration at one or more of the amino acid positions listed in Table 5B, such alterations are relative to the following reference sequence: MSEVEFSHEYWMRHALTLAKRARDEREVPVGAVLVLNNRVIGEGWNRAIGLHDPTAHAEIMALR QGGLVMQNYRLIDATLYVTFEPCVMCAGAMIHSRIGRVVFGVRNAKTGAAGSLMDVLHYPGMNH RVEITEGILADECAALLCYFFRMPRQVFNAQKKAQSSTD (SEQ ID NO: 1), or a corresponding position in another adenosine deaminase. In embodiments, ABE8 comprises alterations at amino acids 82 and/or 166 of SEQ ID NO: 1 In some embodiments, ABE8 comprises further alterations, as described herein, relative to the reference sequence.

[0096] By “Adenosine Base Editor 8 (ABE8) polynucleotide” is meant a polynucleotide encoding an ABE8 polypeptide.

[0097] “Administering” is referred to herein as providing one or more compositions described herein to a patient or a subject. By way of example and without limitation, composition administration (e.g., injection) can be performed by intravenous (i.v.) injection, sub-cutaneous (s.c.) injection, intradermal (i.d.) injection, intraperitoneal (i.p.) injection, or intramuscular (i.m.) injection. One or more such routes can be employed. Parenteral administration can be, for example, by bolus injection or by gradual perfusion over time. In some embodiments, parenteral administration includes infusing or injecting intravascularly, intravenously, intramuscularly, intraarterially, intrathecally, intratumorally, intradermally, intraperitoneally, transtracheally, subcutaneously, subcuticularly, intraarticularly, subcapsularly, subarachnoidly and intrasternally. Alternatively, or concurrently, administration can be by the oral route.

[0098] By “agent” is meant any cell, small molecule chemical compound, antibody, nucleic acid molecule, or polypeptide, or fragments thereof.

[0099] “Allogeneic,” as used herein, refers to cells that are genetically dissimilar from the cells of a subject to which they are to be administered. In embodiments, allogeneic cells are administered to a genetically dissimilar and/or immunologically incompatible subject.

[0100] By “alteration” is meant a change in the level, structure, or activity of an analyte, gene or polypeptide as detected by standard art known methods such as those described herein. As used herein, an alteration includes a change (e.g., increase or reduction) in expression levels. In embodiments, the increase or reduction in expression levels is by 10%, 25%, 40%, 50% or greater. In some embodiments, an alteration includes an insertion, deletion, or substitution of a nucleobase or amino acid (by, e.g., genetic engineering).

[0101] By “ameliorate” is meant reduce, suppress, attenuate, diminish, arrest, or stabilize the development or progression of a disease.

[0102] By “analog” is meant a molecule that is not identical but has analogous functional or structural features. For example, a polypeptide analog retains the biological activity of a corresponding naturally-occurring polypeptide, while having certain biochemical modifications that enhance the analog's function relative to a naturally occurring polypeptide. Such biochemical modifications could increase the analog's protease resistance, membrane permeability, or half-life, without altering, for example, ligand binding. An analog may include an unnatural amino acid.

[0103] As used herein, the term “antibody” refers to an immunoglobulin molecule that specifically binds to, or is immunologically reactive with, a particular antigen. The term “antibody” includes polyclonal, monoclonal, genetically engineered, and otherwise modified forms of antibodies, including but not limited to chimeric antibodies, humanized antibodies, heteroconjugate antibodies (e.g., bi-tri- and quad-specific antibodies, diabodies, triabodies, and tetrabodies), and antigen binding fragments of antibodies, including, for example, Fab′, F(ab′)2, Fab, Fv, rlgG, and scFv fragments. Further non-limiting examples of antibodies include nanobodies and VHH domains. Unless otherwise indicated, the term “monoclonal antibody” (mAb) is meant to include both intact molecules, as well as antibody fragments (including, for example, Fab and F(ab′)2 fragments) that are capable of specifically binding to a target protein. As used herein, the Fab and F(ab′)2 fragments refer to antibody fragments that lack the Fc fragment of an intact antibody. Examples of these antibody fragments are described herein. Typically, an antibody binds to an antigen using a combination of a variable light chain (VL) and a corresponding variable heavy chain (VH) domain.

[0104] The term “antigen-binding domain” refers to a polypeptide or fragment thereof that binds an antigen. In embodiments, two or more antigen-binding domains can function in combination to bind an antigen. In some embodiments, the antigen-binding domain is a region of an antibody.

[0105] Antibodies (immunoglobulins) comprise two heavy chains linked together by disulfide bonds, and two light chains, with each light chain being linked to a respective heavy chain by disulfide bonds in a “Y” shaped configuration. Each heavy chain has at one end a variable domain (VH) followed by a number of constant domains (CH). Each light chain has a variable domain (VL) at one end and a constant domain (CL) at its other end. The variable domain of the light chain (VL) is aligned with the variable domain of the heavy chain (VL), and the light chain constant domain (CL) is aligned with the first constant domain of the heavy chain (CH1). The variable domains of each pair of light and heavy chains form the antigen binding site. The isotype of the heavy chain (gamma, alpha, delta, epsilon or mu) determines the immunoglobulin class (IgG, IgA, IgD, IgE or IgM, respectively). The light chain is either of two isotypes (kappa (κ) or lambda (λ)) found in all antibody classes. The terms “antibody” or “antibodies” include intact antibodies, such as polyclonal antibodies or monoclonal antibodies (mAbs), as well as proteolytic portions or fragments thereof, such as the Fab or F(ab′)2 fragments, that are capable of specifically binding to a target protein. Antibodies may include chimeric antibodies; recombinant and engineered antibodies, and antigen binding fragments thereof. Exemplary functional antibody fragments comprising whole or essentially whole variable regions of both the light and heavy chains are defined as follows: (i) Fv, defined as a genetically engineered fragment consisting of the variable region of the light chain and the variable region of the heavy chain expressed as two chains; (ii) single-chain Fv (“scFv”), a genetically engineered single-chain molecule including the variable region of the light chain and the variable region of the heavy chain, linked by a suitable polypeptide linker; (iii) Fab, a fragment of an antibody molecule containing a monovalent antigen-binding portion of an antibody molecule, obtained by treating an intact antibody with the enzyme papain to yield the intact light chain and the Fd fragment of the heavy chain, which consists of the variable and CH1 domains thereof; (iv) Fab′, a fragment of an antibody molecule containing a monovalent antigen-binding portion of an antibody molecule, obtained by treating an intact antibody with the enzyme pepsin, followed by reduction (two Fab′ fragments are generated per antibody molecule); and (v) F(ab′)2, a fragment of an antibody molecule containing a monovalent antigen-binding portion of an antibody molecule, obtained by treating an intact antibody with the enzyme pepsin (i.e., a dimer of Fab′ fragments held together by two disulfide bonds).

[0106] By “base editor (BE),” or “nucleobase editor polypeptide (NBE)” is meant an agent that binds a polynucleotide and has nucleobase modifying activity. In various embodiments, the base editor comprises a nucleobase modifying polypeptide (e.g., a deaminase) and a polynucleotide programmable nucleotide binding domain (e.g., Cas9 or Cpf1). Representative nucleic acid and protein sequences of base editors include those sequences having about or at least about 85% sequence identity to any base editor sequence provided in the sequence listing, such as those corresponding to SEQ ID NOs: 2-11.

[0107] By “BE4 cytidine deaminase (BE4) polypeptide,” is meant a base editor comprising a nucleic acid programmable DNA binding protein (napDNAbp) domain, a cytidine deaminase domain, and two uracil glycosylase inhibitor domains (UGIs). In embodiments, the napDNAbp is a Cas9n(D10A) polypeptide. Non-limiting examples of cytidine deaminase domains include rAPOBEC, ppAPOBEC, RrA3F, AmAPOBEC1, and SsAPOBEC3B.

[0108] By “BE4 cytidine deaminase (BE4) polynucleotide,” is meant a polynucleotide encoding a BE4 polypeptide.

[0109] By “base editing activity” is meant acting to chemically alter a base within a polynucleotide. In one embodiment, a first base is converted to a second base. In one embodiment, the base editing activity is cytidine deaminase activity, e.g., converting target C•G to T•A. In another embodiment, the base editing activity is adenosine or adenine deaminase activity, e.g., converting A•T to G•C.

[0110] By “base editing efficiency” is meant the total percent of one or more target bases in a sample that have been modified using a base editor. In some cases, the base editing efficiency is calculated as the total percent of target polynucleotides in a sample containing a modified target base. In some instances, the base editing efficiency is calculated as the total percent of target polynucleotides in a sample containing a modification to one or more (e.g., 2, 3, 4, 5, 6, 7, 8, 9 or 10) of 2, 3, 4, 5, 6, 7, 8, 9, or 10 target bases. Methods for measuring base editing efficiency for a base editor are known in the art (see, e.g., Gaudelli, et al. Nature 551:464-471 (2017), the disclosure of which is incorporated herein in its entirety for all purposes). In some cases a base editing efficiency is a median base editing efficiency calculated across 2, 3, 4, 5, 6, 7, 8, 9, 10, 15, 20, 25, 30, 35, 40, 45, 50, 60, 70, 80, 90, 100 or more target sites.

[0111] By “base editing window” for a base editor is meant bases within a target polynucleotide sequence that can be modified using the base editor. In some embodiments, the position of the nucleobases in the target polynucleotide sequence are numbered relative to a protospacer adjacent motif (PAM) for which a nucleic acid programmable DNA binding protein (napDNAbp) domain of the base editor has specificity, where base 1 corresponds to the base immediately adjacent to the PAM. In some embodiments, the position of the nucleobases in the target polynucleotide sequence are numbered relative to the 5′ or 3′ end of a spacer of a guide polynucleotide used to guide a nucleic acid programmable DNA binding protein (napDNAbp) domain of the base editor to a target site, where base 1 corresponds to the 5′ or 3′ terminal base of the spacer.

[0112] The term “base editor system” refers to an intermolecular complex for editing a nucleobase of a target nucleotide sequence. In various embodiments, the base editor (BE) system comprises (1) a polynucleotide programmable nucleotide binding domain, a deaminase domain (e.g., cytidine deaminase or adenosine deaminase) for deaminating nucleobases in the target nucleotide sequence; and (2) one or more guide polynucleotides (e.g., guide RNA) in conjunction with the polynucleotide programmable nucleotide binding domain. In various embodiments, the base editor (BE) system comprises a nucleobase editor domain selected from an adenosine deaminase or a cytidine deaminase, and a domain having nucleic acid sequence specific binding activity. In some embodiments, the base editor system comprises (1) a base editor (BE) comprising a polynucleotide programmable DNA binding domain and a deaminase domain for deaminating one or more nucleobases in a target nucleotide sequence; and (2) one or more guide RNAs in conjunction with the polynucleotide programmable DNA binding domain. In some embodiments, the polynucleotide programmable nucleotide binding domain is a polynucleotide programmable DNA binding domain. In some embodiments, the base editor is a cytidine base editor (CBE). In some embodiments, the base editor is an adenine or adenosine base editor (ABE). In some embodiments, the base editor is an adenine or adenosine base editor (ABE) or a cytidine or cytosine base editor (CBE). In some embodiments, the base editor system (e.g., a base editor system comprising a cytidine deaminase) comprises a uracil glycosylase inhibitor or other agent or peptide (e.g., a uracil stabilizing protein such as provided in WO2022015969, the disclosure of which is incorporated herein by reference in its entirety for all purposes) that inhibits the inosine base excision repair system.

[0113] By “calcineurin inhibitor” is meant an immunosuppressive agent capable of inhibiting the activity of calcineurin, a calcium and calmodulin dependent serine/threonine protein phosphatase. Non-limiting examples of calcineurin inhibitors include cyclosporine A, pimecrolimus, tacrolimus, and voclosporin (see Table A).

TABLE A
Representative calcineurin Inhibitors

| | CAS Number | |
|---|---|---|
| Drug Name | (IUPAC name) | Structure |
| Cyclosporine A | 59865-13-3 ((3S,6S,9S,12R,15S,18S,21S, 24S,30S,33S)-30-Ethyl-33- [(1R,2R,4E)-1-hydroxy-2- methyl-4-hexen-1-yl]- 6,9,18,24-tetraisobutyl-3,21- diisopropyl- 1,4,7,10,12,15,19,25,28- nonamethyl- 1,4,7,10,13,16,19,22,25,28,31- undecaazacyclotritriacontane- 2,5,8,11,14,17,20,23,26,29,32- undecone) | [chemical structure] |
| Pimecrolimus | 137071-32-0 ((3S,4R,5S,8R,9E,12S,14S, 15R,16S,18R,19R,26aS)-3- {(E)-2-[(1R,3R,4S)-4-chloro- 3-methoxycyclohexyl]-1- methylvinyl}-8-ethyl- 5,6,8,11,12,13,14,15,16, 17,18,19,24,25,26,26a- hexadecahydro-5,19- dihydroxy-14,16-dimethoxy- 4,10,12,18-tetramethyl-15,19- epoxy-3H-pyrido[2,1- c][1,4]oxaazacyclotricosin- 1,7,20,21(4H,23H)-tetrone) | [chemical structure] |
| Tacrolimus | 104987-11-3 ((−)- (3S,4R,5S,8R,9E,12S,14S, 15R,16S,18R,26aS)-8-allyl- 5,6,8,11,12,13,14,15,16, 17,18,19,24,25,26,26a- hexadecahydro-5,19- dihydroxy-3-{(E)-2- [(1R,3R,4R)-4-hydroxy-3- methylcyclohexyl]-1- methylvinyl}-14,16- dimethoxy-4,10,12,18- tetramethyl-15,19-epoxy-3H- pyrido[2,1- c][1,4]oxaazacyclotricosane- 1,7,20,21(4H,23H)-tetrone) | [chemical structure] |
| Voclosporin (Lupkynis) | 515814-01-4 ((3S,6S,9S,12R,15S,18S,21S, 24S,30S,33S)-30-Ethyl-33- [(1R,2R,4E)-1-hydroxy-2- methylhepta-4,6-dien-1-yl]- 1,4,7,10,12,15,19,25,28- nonamethyl-6,9,18,24- tetrakis(2-methylpropyl)- 3,21-di(propan-2-yl)- 1,4,7,10,13,16,19,22,25,28,31- undecaazacyclotritriacontane- 2,5,8,11,14,17,20,23,26,29,32- undecone) | [chemical structure] |

[0114] The term “Cas9” or “Cas9 domain” refers to an RNA guided nuclease comprising a Cas9 protein, or a fragment thereof (e.g., a protein comprising an active, inactive, or partially active DNA cleavage domain of Cas9, and/or the gRNA binding domain of Cas9). A Cas9 nuclease is also referred to sometimes as a casnl nuclease or a CRISPR (clustered regularly interspaced short palindromic repeat) associated nuclease.

[0115] By “chimeric antigen receptor” or “CAR” is meant a synthetic or engineered receptor comprising an extracellular antigen binding domain operationally joined to one or more intracellular signaling domains where the CAR confers specificity for an antigen bound by the extracellular antigen binding domain onto an immune effector cell. In some cases, the intracellular signaling domain is a T cell signaling domain. In embodiments, the immune effector cell is a T cell, an NK cell, or a macrophage. In embodiments, the CAR is a SUPRA CAR, an anti-tag CAR, a TCR-CAR, or a TCR-like CAR (see, e.g., Guedan, et al. “Engineering and Design of Chimeric Antigen Receptors,” Methods and Clinical Development, 12:145-156 (2019); Poorebrahim, et al., “TCR-like CARs and TCR-CARs targeting neoepitopes: an emerging potential,” Cancer Gene Therapy, 28:581-589 (2021); and Minutolo, et al. “The Emergence of Universal Immune Receptor T Cell Therapy for Cancer,” Front Oncol., 9:176 (2019), the disclosures of which are incorporated herein by reference in their entireties for all purposes).

[0116] By “chimeric antigen receptor (CAR) T cell” or “CAR-T cell” is meant a T cell expressing a CAR that has antigen specificity determined by the antibody-derived targeting domain of the CAR. As used herein, “CAR-T cells” include T cells, regulatory T cells (TREG), macrophages, and NK cells. As used herein, the term “CAR-T cells” includes cells engineered to express a CAR or a T cell receptor (TCR, sometimes referred to as TCR-CARs or TCR-like CARs). Methods of making CARs (e.g., for treatment of cancer) are publicly available (see, e.g., Park et al., Trends Biotechnol., 29:550-557, 2011; Grupp et al., N Engl J Med., 368:1509-1518, 2013; Han et al., J. Hematol Oncol. 6:47, 2013; Haso et al., (2013) Blood, 121, 1165-1174; Mohseni, et al., (2020) Front. Immunol., 11, art. 1608, doi: 10.3389/fimmu.2020.01608; Eggenhuizen, et al. Int. J. Mol. Sci. (2020), 21:7015, doi: 10.3390/ijms21197015; Poorebrahim, et al., Cancer Gene Ther 28, 581-589 (2021), doi.org/10.1038/s41417-021-00307-7, PCT Pubs. WO2012/079000, WO2013/059593; and U.S. Pub. 2012/0213783, the disclosure of each of which is incorporated herein by reference herein in its entirety).

[0117] The term “conservative amino acid substitution” or “conservative mutation” refers to the replacement of one amino acid by another amino acid with a common property. A functional way to define common properties between individual amino acids is to analyze the normalized frequencies of amino acid changes between corresponding proteins of homologous organisms (Schulz, G. E. and Schirmer, R. H., Principles of Protein Structure, Springer-Verlag, New York (1979)). According to such analyses, groups of amino acids can be defined where amino acids within a group exchange preferentially with each other, and therefore resemble each other most in their impact on the overall protein structure (Schulz, G. E. and Schirmer, R. H., supra). Non-limiting examples of conservative mutations include amino acid substitutions of amino acids, for example, lysine for arginine and vice versa such that a positive charge can be maintained; glutamic acid for aspartic acid and vice versa such that a negative charge can be maintained; serine for threonine such that a free-OH can be maintained; and glutamine for asparagine such that a free —NH₂ can be maintained.

[0118] Amino acids generally can be grouped into classes according to the following common side-chain properties:
[0119] (1) hydrophobic: Norleucine, Met, Ala, Val, Leu, He;
[0120] (2) neutral hydrophilic: Cys, Ser, Thr, Asn, Gin;
[0121] (3) acidic: Asp, Glu;
[0122] (4) basic: His, Lys, Arg;
[0123] (5) residues that influence chain orientation: Gly, Pro;
[0124] (6) aromatic: Trp, Tyr, Phe.

[0125] In some embodiments, conservative substitutions can involve the exchange of a member of one of these classes for another member of the same class. In some embodiments, non-conservative amino acid substitutions can involve exchanging a member of one of these classes for another class.

[0126] The term “coding sequence” or “protein coding sequence” as used interchangeably herein refers to a segment of a polynucleotide that codes for a protein. Coding sequences can also be referred to as open reading frames. The region or sequence is bounded nearer the 5′ end by a start codon and nearer the 3′ end with a stop codon. Stop codons useful with the base editors described herein include the following: TAG, TAA, and TGA, TAG, TAA, TGA.

[0127] By “complex” is meant a combination of two or more molecules whose interaction relies on inter-molecular forces. Non-limiting examples of inter-molecular forces include covalent and non-covalent interactions. Non-limiting examples of non-covalent interactions include hydrogen bonding, ionic bonding, halogen bonding, hydrophobic bonding, van der Waals interactions (e.g., dipole-dipole interactions, dipole-induced dipole interactions, and London dispersion forces), and x-effects. In an embodiment, a complex comprises polypeptides, polynucleotides, or a combination of one or more polypeptides and one or more polynucleotides. In one embodiment, a complex comprises one or more polypeptides that associate to form a base editor (e.g., base editor comprising a nucleic acid programmable DNA binding protein, such as Cas9, and a deaminase) and a polynucleotide (e.g., a guide RNA). In an embodiment, the complex is held together by hydrogen bonds. It should be appreciated that one or more components of a base editor (e.g., a deaminase, or a nucleic acid programmable DNA binding protein) may associate covalently or non covalently. As one example, a base editor may include a deaminase covalently linked to a nucleic acid programmable DNA binding protein (e.g., by a peptide bond). Alternatively, a base editor may include a deaminase and a nucleic acid programmable DNA binding protein that associate noncovalently (e.g., where one or more components of the base editor are supplied in trans and associate directly or via another molecule such as a protein or nucleic acid). In an embodiment, one or more components of the complex are held together by hydrogen bonds.

[0128] By “cytosine” or “4-Aminopyrimidin-2 (1H)-one” is meant a purine nucleobase with the molecular formula C₄H₅N₃O, having the structure

[chemical structure]

and corresponding to CAS No. 71-30-7.

[0129] By “cytidine” is meant a cytosine molecule attached to a ribose sugar via a glycosidic bond, having the structure

[chemical structure]

and corresponding to CAS No. 65-46-3. Its molecular formula is C₉H₁₃N₃O₅.

[0130] By “Cytidine Base Editor (CBE)” is meant a base editor comprising a cytidine deaminase.

[0131] By “Cytidine Base Editor (CBE) polynucleotide” is meant a polynucleotide encoding a CBE.

[0132] By “cytidine deaminase” or “cytosine deaminase” is meant a polypeptide or fragment thereof capable of deaminating cytidine or cytosine. In embodiments, the cytidine or cytosine is present in a polynucleotide. In one embodiment, the cytidine deaminase converts cytosine to uracil or 5-methylcytosine to thymine. The terms “cytidine deaminase” and “cytosine deaminase” are used interchangeably throughout the application. Petromyzon marinus cytosine deaminase 1 (PmCDA1) (SEQ ID NO: 13-14), Activation-induced cytidine deaminase (AICDA) (SEQ ID NOs: 15-21), and APOBEC (SEQ ID NOs: 12-61) are exemplary cytidine deaminases. Further exemplary cytidine deaminase (CDA) sequences are provided in the Sequence Listing as SEQ ID NOs: 62-66 and SEQ ID NOs: 67-189. Non-limiting examples of cytidine deaminases include those described in PCT/US20/16288, PCT/US2018/021878, 180802-021804/PCT, PCT/US2018/048969, and PCT/US2016/058344. By “cytosine deaminase activity” is meant catalyzing the deamination of cytosine or cytidine. In one embodiment, a polypeptide having cytosine deaminase activity converts an amino group to a carbonyl group. In an embodiment, a cytosine deaminase converts cytosine to uracil (i.e., C to U) or 5-methylcytosine to thymine (i.e., 5mC to T). In some embodiments, a cytosine deaminase as provided herein has increased cytosine deaminase activity (e.g., at least 10-fold, 20-fold, 30-fold, 40-fold, 50-fold, 60-fold, 70-fold, 80-fold, 90-fold, 100-fold or more) relative to a reference cytosine deaminase.

[0133] The term “deaminase” or “deaminase domain,” as used herein, refers to a protein or fragment thereof that catalyzes a deamination reaction.

[0134] “Detect” refers to identifying the presence, absence or amount of the analyte to be detected. In one embodiment, a sequence alteration in a polynucleotide or polypeptide is detected. In another embodiment, the presence of indels is detected.

[0135] By “detectable label” is meant a composition that when linked to a molecule of interest renders the latter detectable, via spectroscopic, photochemical, biochemical, immunochemical, or chemical means. For example, useful labels include radioactive isotopes, magnetic beads, metallic beads, colloidal particles, fluorescent dyes, electron-dense reagents, enzymes (for example, as commonly used in an enzyme linked immunosorbent assay (ELISA)), biotin, digoxigenin, or haptens.

[0136] By “disease” is meant any condition or disorder that damages or interferes with the normal function of a cell, tissue, or organ. In some embodiments, the disease is a cancer (e.g., a hematological cancer or a solid tumor). In some instances, the disease is a disease that can be treated using the base edited CAR-T cells of the disclosure. In one embodiment, the disease is a neoplasia or cancer. In some embodiments, the disease is a hematological cancer. By “hematological cancer” is meant a malignancy of immune system cells. In some embodiments, the hematological cancer is leukemia, myeloma, and/or lymphoma. Lymphomas and Leukemias are examples of “liquid cancers” or cancers present in the blood and are derived from the transformation of either a hematopoietic precursor in the bone marrow or a mature hematopoietic cell in the blood. Leukemias can be lymphoid or myeloid, and acute or chronic. In the case of myelomas, the transformed cell is a fully differentiated plasma cell that may be present as a dispersed collection of malignant cells or as a solid mass in the bone marrow. In the case of lymphomas, a transformed lymphocyte in a secondary lymphoid tissue generates a solid mass. Lymphomas are classified either Hodgkin lymphoma (HL) or non-Hodgkin lymphoma (NHL). In some instances, the hematologic cancer is a mantle cell lymphoma (MCL) or a B cell lymphoma (BCL).

[0137] By “dual editing activity” or “dual deaminase activity” is meant having adenosine deaminase and cytidine deaminase activity. In one embodiment, a base editor having dual editing activity has both A→G and C→T activity, wherein the two activities are approximately equal or are within about 10% or 20% of each other. In another embodiment, a dual editor has A→G activity that no more than about 10% or 20% greater than C→T activity. In another embodiment, a dual editor has A→G activity that is no more than about 10% or 20% less than C→T activity. In some embodiments, the adenosine deaminase variant has predominantly cytosine deaminase activity, and little, if any, adenosine deaminase activity. In some embodiments, the adenosine deaminase variant has cytosine deaminase activity, and no significant or no detectable adenosine deaminase activity.

[0138] By “effective amount” is meant the amount of an agent (e.g., a base editor, cell, such as a CAR-T cell) as described herein, that is required to ameliorate the symptoms of a disease relative to an untreated patient or an individual without disease, i.e., a healthy individual, or is the amount of the agent sufficient to elicit a desired biological response. The effective amount of active compound(s) used to practice embodiments of the present disclosure for therapeutic treatment of a disease varies depending upon the manner of administration, the age, body weight, and general health of the subject. Ultimately, the attending physician or veterinarian will decide the appropriate amount and dosage regimen. Such amount is referred to as an “effective” amount. In one embodiment, an effective amount is the amount of a base editor of the disclosure sufficient to introduce an alteration in a gene of interest in a cell (e.g., a cell in vitro or in vivo). In one embodiment, an effective amount is the amount of a base editor required to achieve a therapeutic effect. Such therapeutic effect need not be sufficient to alter a pathogenic gene in all cells of a subject, tissue or organ, but only to alter the pathogenic gene in about 1%, 5%, 10%, 25%, 50%, 75% or more of the cells present in a subject, tissue or organ. In one embodiment, an effective amount is sufficient to ameliorate one or more symptoms of a disease.

[0139] By “fragment” is meant a portion of a polypeptide or nucleic acid molecule. This portion contains, at least about 10%, 20%, 30%, 40%, 50%, 60%, 70%, 80%, or 90% of the entire length of the reference nucleic acid molecule or polypeptide. A fragment may contain 10, 20, 30, 40, 50, 60, 70, 80, 90, or 100, 200, 300, 400, 500, 600, 700, 800, 900, or 1000 nucleotides or amino acids. In some embodiments, the fragment is a functional fragment.

[0140] By “glucocorticoid” is meant a class of corticosteroids that bind to a glucocorticoid receptor. Non-limiting examples of glucocorticoids include dexamethasone and prednisolone (see Table B). Further non-limiting examples of glucocorticoids include Cortisol (hydrocortisone), Cortisone, Prednisone, Methylprednisolone, Betamethasone, Triamcinolone, Deflazacort, Fludrocortisone acetate, Deoxycorticosterone acetate, Aldosterone, and Beclometasone.

TABLE B
Representative glucocorticoids

| Drug Name | CAS Number (IUPAC name) | Structure |
|---|---|---|
| Dexamethasone | 50-02-2 ((8S,9R,10S,11S,13S,14S, 16R,17R)-9-Fluoro-11,17- dihydroxy-17-(2- hydroxyacetyl)-10,13,16- trimethyl- 6,7,8,9,10,11,12,13,14,15,16, 17-dodecahydro-3H- cyclopenta[a]phenanthren-3- one) | [chemical structure] |
| Prednisolone | 50-24-8 ((11β)-11,17,21- Trihydroxypregna-1,4-diene- 3,20-dione) | [chemical structure] |

[0141] By “guide polynucleotide” is meant a polynucleotide or polynucleotide complex which is specific for a target sequence and can form a complex with a polynucleotide programmable nucleotide binding domain protein (e.g., Cas9 or Cpf1). In an embodiment, the guide polynucleotide is a guide RNA (gRNA). gRNAs can exist as a complex of two or more RNAs, or as a single RNA molecule.

[0142] “Host versus graft disease” (HVGD) or “host-versus-graft rejection” refers to a pathological condition where the immune system of a host generates an immune response against transplanted cells of an allogeneic donor.

[0143] By “Human Leukocyte Antigen-E (HLA-E) polypeptide” is meant a protein having at least about 85% amino acid sequence identity to NCBI Accession No. NP_005507.3, or a fragment thereof, and having immunomodulatory activity. An exemplary amino acid sequence is provided below.

(SEQ ID NO: 472)

| | |
|---|---|
| 1 | mvdgtlllll sealaltqtw agshslkyfh tsvsrpgrge |
| | prfisvgyvd dtqfvrfdnd |
| 61 | aasprmvpra pwmeqegsey wdretrsard taqifrvnlr |
| | tlrgyynqse agshtlqwmh |
| 121 | gcelgpdgrf lrgyeqfayd gkdyltlned lrswtavdta |
| | aqiseqksnd aseaehqray |
| 181 | ledtcvewlh kylekgketl lhleppkthv thhpisdhea |
| | tlrcwalgfy paeitltwqq |
| 241 | dgeghtqdte lvetrpagdg tfqkwaavvv psgeeqrytc |
| | hvqheglpep vtlrwkpasq |
| 301 | ptipivgiia glvllgsvvs gavvaaviwr kkssggkggs |
| | yskaewsdsa qgseshsl. |

[0144] By “Human Leukocyte Antigen-E (HLA-E) polynucleotide” is meant a nucleic acid molecule encoding an HLA-E polypeptide, as well as the introns, exons, 3′ untranslated regions, 5′ untranslated regions, and regulatory sequences associated with its expression, or fragments thereof. An exemplary HLA-E polynucleotide is provided at NCBI Accession No. NM_005516.6, which is provided below.
[0145] 1 ctcaggactc agaggctggg atcatggtag atggaaccct ccttttacte ctctcggagg
[0146] 61 ccctggccct tacccagacc tggggggct cccactcctt gaagtatttc cacacttccg
[0147] 121 tgtcccggcc cggccgcggg gagccccgct tcatctctgt gggctacgtg gacgacaccc
[0148] 181 agttcgtgcg cttcgacaac gacgccgcga gtccgaggat ggtgccgcgg gcgccgtgga
[0149] 241 tggagcagga ggggtcagag tattgggacc gggagacacg gagcgccagg gacaccgcac
[0150] 301 agattttccg agtgaatctg cggacgctgc gcggctacta caatcagage gaggccgggt
[0151] 361 ctcacaccct gcagtggatg catggctgcg agctggggcc cgacgggcgc ttcctccgcg
[0152] 421 ggtatgaaca gttcgcctac gacggcaagg attatctcac cctgaatgag gacctgcgct
[0153] 481 cctggaccgc ggtggacacg gcggctcaga tctccgagca aaagtcaaat gatgcctctg
[0154] 541 aggcggagca ccagagagcc tacctggaag acacatgcgt ggagtggctc cacaaatacc
[0155] 601 tggagaaggg gaaggagacg ctgcttcacc tggagccccc aaagacacac gtgactcacc
[0156] 661 accccatctc tgaccatgag gccaccctga ggtgctgggc cctgggcttc taccctgcgg
[0157] 721 agatcacact gacctggcag caggatgggg agggccatac ccaggacacg gagctcgtgg
[0158] 781 agaccaggcc tgcaggggat ggaaccttcc agaagtgggc agctgtggtg gtgccttctg
[0159] 841 gagaggagca gagatacacg tgccatgtgc agcatgaggg gctacccgag cccgtcaccc
[0160] 901 tgagatggaa gccggcttcc cagcccacca tccccatcgt gggcatcatt gctggcctgg
[0161] 961 ttctccttgg atctgtggtc tctggagctg tggttgctgc tgtgatatgg aggaagaaga
[0162] 1021 gctcaggtgg aaaaggaggg agctactcta aggctgagtg gagcgacagt gcccaggggt
[0163] 1081 ctgagtctca cagcttgtaa agcctgagac agctgccttg tgtgcgactg agatgcacag
[0164] 1141 ctgccttgtg tgcgactgag atgcaggatt tectcacgcc tcccctatgt gtcttagggg
[0165] 1201 actctggctt ctctttttgc aagggcctct gaatctgtct gtgtccctgt tagcacaatg
[0166] 1261 tgaggaggta gagaaacagt ccacctctgt gtctaccatg acccccttcc tcacactgac
[0167] 1321 ctgtgttcct tccctgttct cttttctatt aaaaataaga acctgggcag agtgcggcag
[0168] 1381 ctcatgcctg taatcccagc acttagggag gccgaggagg gcagatcacg aggtcaggag
[0169] 1441 atcgaaacca tcctggctaa cacggtgaaa ccccgtctct actaaaaaat acaaaaaatt
[0170] 1501 agctgggcgc agaggcacgg gcctgtagtc ccagctactc aggaggcgga ggcaggagaa
[0171] 1561 tggcgtcaac ccgggaggcg gaggttgcag tgagccagga ttgtgcgact gcactccagc
[0172] 1621 ctgggtgaca gggtgaaacg ccatctcaaa aaataaaaat tgaaaaataa aaaaagaacc
[0173] 1681 tggatctcaa tttaattttt catattcttg caatgaaatg gacttgagga agctaagatc
[0174] 1741 atagctagaa atacagataa ttccacagca catctctage aaatttagcc tattcctatt
[0175] 1801 ctctagccta ttccttacca cctgtaatct tgaccatata ccttggagtt gaatattgtt
[0176] 1861 ttcatactgc tgtggtttga atgttccctc caacactcat gttgagactt aatccctaat
[0177] 1921 gtggcaatac tgaaaggtgg ggcctttgag atgtgattgg atcgtaaggc tgtgccttca
[0178] 1981 ttcatgggtt aatggattaa tgggttatca caggaatggg actggtggct ttataagaag
[0179] 2041 aggaaaagag aactgagcta gcatgcccag cccacagaga gcctccacta gagtgatgct
[0180] 2101 aagtggaaat gtgaggtgca gctgccacag agggccccca ccagggaaat gtctagtgtc
[0181] 2161 tagtggatcc aggccacagg agagagtgcc ttgtggagcg ctgggagcag gacctgacca
[0182] 2221 ccaccaggac cccagaactg tggagtcagt ggcagcatgc agcgccccct tgggaaagct
[0183] 2281 ttaggcacca gcctgcaacc cattcgagca gccacgtagg ctgcacccag caaagccaca
[0184] 2341 ggcacggggc tacctgaggc cttgggggcc caatccctgc tccagtgtgt ccgtgaggca
[0185] 2401 gcacacgaag tcaaaagaga ttattctctt cccacagata ccttttctct cccatgaccc
[0186] 2461 tttaacagca tctgcttcat tcccctcacc ttcccaggct gatctgaggt aaactttgaa
[0187] 2521 gtaaaataaa agctgtgttt gagcatca (SEQ ID NO: 473). The HLA-E gene corresponds to Ensembl: ENSG00000116815.

[0188] “Hybridization” means hydrogen bonding, which may be Watson-Crick, Hoogsteen or reversed Hoogsteen hydrogen bonding, between complementary nucleobases. For example, adenine and thymine are complementary nucleobases that pair through the formation of hydrogen bonds.

[0189] By “immune cell” is meant a cell of the immune system capable of generating an immune response. Exemplary immune cells include, but are not limited to, T cells, NK cells, B cells, macrophages, hematopoietic stem cells, or precursors thereof. In embodiments, an immune cell is allogeneic to a subject to whom the cell is to be administered. In embodiments, an immune cell is from a donor and is allogeneic to a subject to which the immune cell will be administered after being modified according to the methods provided herein. The disclosure features methods for preparing modified allogeneic immune cells with improved characteristics (e.g., increased persistence in a subject) as well as the cells produced by these methods.

[0190] By “immune effector cell” is meant a lymphocyte, once activated, capable of effecting an immune response upon a target cell. In some embodiments, immune effector cells are effector T cells. In some embodiments, the effector T cell is a naïve CD8⁺ T cell, a cytotoxic T cell, a natural killer T (NKT) cell, a macrophage, or a natural killer (NK) cell. In some embodiments, immune effector cells are effector NK cells. In some embodiments, the effector T cells are thymocytes, immature T lymphocytes, mature T lymphocytes, resting T lymphocytes, or activated T lymphocytes. In some embodiments the immune effector cell is a CD4⁺ CD8⁺ T cell or a CD4⁻ CD8⁻ T cell. In some embodiments the immune effector cell is a T helper cell. In some embodiments the T helper cell is a T helper 1 (Th1), a T helper 2 (Th2) cell, or a helper T cell expressing CD4 (CD4+ T cell).

[0191] By “immunogen encoding polynucleotide” is meant a nucleic acid molecule that encodes an immunogen.

[0192] By “immunomodulatory activity” is meant increasing, decreasing, or sustaining an immune response.

[0193] By “immunosuppressant agent” is meant an agent associated with inhibiting or preventing activity of an immune cell. In some embodiments, an immunosuppressant agent is an agent that reduces or prevents the ability of a subject's immune system to elicit an immune response to an allogeneic T- or NK-cell (e.g, a CAR-T cell) administered to the subject. Non-limiting examples of immunosuppressant agents include mTOR inhibitors (e.g., a rapalog, such as rapamycin or Everolimus), Calcineurin Inhibitors (e.g., cyclosporine A or tacrolimus), and Glucocorticoids (e.g., Dexamethasone or Prednisolone).

[0194] By “immunosuppression” is meant a reduction in or elimination of the ability of an immune cell to elicit an immune response when exposed to an immunosuppressive agent. In embodiments, the immunosuppressive agent is an immunosuppressive agent. In some cases, the immune response is antigen-dependent proliferation, cytokine production, and/or killing of a target cell.

[0195] By “increases” is meant a positive alteration of at least 10%, 25%, 50%, 75%, or 100%, or about 1.5 fold, about 2 fold, about 3-fold, about 4-fold, about 5-fold, about 6-fold, about 7-fold, about 8-fold, about 9-fold, about 10-fold, about 15-fold, about 20-fold, about 25-fold, about 30-fold, about 35-fold, about 40-fold, about 45-fold, about 50-fold, or about 100-fold.

[0196] The terms “inhibitor of base repair”, “base repair inhibitor”, “IBR” or their grammatical equivalents refer to a protein that is capable in inhibiting the activity of a nucleic acid repair enzyme, for example a base excision repair enzyme.

[0197] An “intein” is a fragment of a protein that is able to excise itself and join the remaining fragments (the exteins) with a peptide bond in a process known as protein splicing.

[0198] The terms “isolated,” “purified,” or “biologically pure” refer to material that is free to varying degrees from components which normally accompany it as found in its native state. “Isolate” denotes a degree of separation from original source or surroundings. “Purify” denotes a degree of separation that is higher than isolation. A “purified” or “biologically pure” protein is sufficiently free of other materials such that any impurities do not materially affect the biological properties of the protein or cause other adverse consequences. That is, a nucleic acid or peptide of this disclosure is purified if it is substantially free of cellular material, viral material, or culture medium when produced by recombinant DNA techniques, or chemical precursors or other chemicals when chemically synthesized. Purity and homogeneity are typically determined using analytical chemistry techniques, for example, polyacrylamide gel electrophoresis or high performance liquid chromatography. The term “purified” can denote that a nucleic acid or protein gives rise to essentially one band in an electrophoretic gel. For a protein that can be subjected to modifications, for example, phosphorylation or glycosylation, different modifications may give rise to different isolated proteins, which can be separately purified.

[0199] By “isolated polynucleotide” is meant a nucleic acid molecule that is free of the genes which, in the naturally-occurring genome of the organism from which the nucleic acid molecule of the disclosure is derived, flank the gene. The term therefore includes, for example, a recombinant DNA that is incorporated into a vector; into an autonomously replicating plasmid or virus; or into the genomic DNA of a prokaryote or eukaryote; or that exists as a separate molecule (for example, a cDNA or a genomic or cDNA fragment produced by PCR or restriction endonuclease digestion) independent of other sequences. In addition, the term includes an RNA molecule that is transcribed from a DNA molecule, as well as a recombinant DNA that is part of a hybrid gene encoding additional polypeptide sequence.

[0200] By an “isolated polypeptide” is meant a polypeptide of the disclosure that has been separated from components that naturally accompany it. Typically, the polypeptide is isolated when it is at least 60%, by weight, free from the proteins and naturally-occurring organic molecules with which it is naturally associated. In embodiments, the preparation is at least 75%, at least 90%, or at least 99%, by weight, a polypeptide of the disclosure. An isolated polypeptide of the disclosure may be obtained, for example, by extraction from a natural source, by expression of a recombinant nucleic acid encoding such a polypeptide; or by chemically synthesizing the protein. Purity can be measured by any appropriate method, for example, column chromatography, polyacrylamide gel electrophoresis, or by HPLC analysis.

[0201] The term “kill switch” refers to a polypeptide capable of mediating the killing of a cell when the polypeptide is specifically bound by an agent. In some cases, the agent is a small molecule or monoclonal antibody. In embodiments, a chimeric antigen receptor of the disclosure contains a kill switch and/or a cell of the disclosure surface-expresses a kill switch. In some cases, the agent is Rituximab. In various embodiments, the kill switch is selected from RQR1, RQR2, RQR8, RQR1G4S, RQR2G4S, RR, G4SRR, G4SRRG4S, G4SRRG4SCD8, G4SRRG4SCD28, G4SRRCD28, and QG4S, the amino acid sequences of which are listed in Table C. In various embodiments, the kill switch is fused to a chimeric antigen receptor. In some embodiments, a kill switch is expressed on the surface of a cell and is not fused to a chimeric antigen receptor.

TABLE C
Representative kill switch amino acid sequences

| Kill switch | | SEQ ID |
|---|---|---|
| name | Amino acid sequence | NO |
| RQR1 | CPYSNPSLCSGGGGSELPTQGTFSNVSTNVSPAKPTTTACPYSNPSLC | 474 |
| RQR2 | CPYSNPSLCSGGGGSELPTQGTFSNVSTNVSPAKPTTTCPYSNPSLC | 475 |
| RQR1G4S | SGGGGSCPYSNPSLCSGGGGSELPTQGTFSNVSTNVSPAKPTTTACPYSNPS | 476 |
| | LCSGGGGS | |
| RQR2G4S | SGGGGSCPYSNPSLCSGGGGSELPTQGTFSNVSTNVSPAKPTTTACPYSNPS | 476 |
| | LCSGGGGS | |
| RR | CPYSNPSLCSGGGGSPAKPTTTACPYSNPSLC | 478 |
| G4SRR | SGGGGSCPYSNPSLCSGGGGSPAKPTTTACPYSNPSLC | 479 |
| G4SRRG4S | SGGGGSCPYSNPSLCSGGGGSPAKPTTTACPYSNPSLCSGGGGS | 480 |
| G4SRRG4SCD8 | SGGGGSCPYSNPSLCSGGGGSPAKPTTTACPYSNPSLCSGGGGSPAPRPPTP | 481 |
| | APTIASQPLSLRPEACRPAAGGAVHTRGLDFACD | |
| G4SRRG4SCD28 | SGGGGSCPYSNPSLCSGGGGSPAKPTTTACPYSNPSLCSGGGGSIEVMYPPP | 482 |
| | YLDNEKSNGTIIHVKGKHLCPSPLFPGPSKP | |
| G4SRRCD28 | SGGGGSCPYSNPSLCSGGGGSPAKPTTTACPYSNPSLCSIEVMYPPPYLDNE | 483 |
| | KSNGTIIHVKGKHLCPSPLFPGPSKP | |
| QG4S | ELPTQGTFSNVSTNVSSSGGGGSGGGGSGGGGS | 484 |

[0202] The term “linker”, as used herein, refers to a molecule that links two moieties. In one embodiment, the term “linker” refers to a covalent linker (e.g., covalent bond) or a non-covalent linker.

[0203] By “marker” is meant any agent or clinical parameter having an alteration that is associated with a disease or disorder. In embodiments, the agent is a polypeptide or polynucleotide and the alteration is in expression, level, structure, or activity. In embodiments, the disease or disorder is a neoplasia, such as a hematologic cancer (e.g., a lymphoma). A non-limiting examples of a markers include CD5, CD7, CD19, CD20, CD22, CD79B, and ROR1.

[0204] By “mechanistic target of rapamycin (mTOR) inhibitor” is meant an agent that inhibits activity of the mechanistic target of rapamycin (mTOR), which is a serine/threonine-specific protein kinase belonging to the family of phosphatidinyl-3 kinase (PI3K) related kinases (PIKKs). In embodiments, the mTOR is a rapalog. Non-limiting examples of rapalogs include rapamycin (see Table D) and analogs thereof. Further non-limiting examples of rapalogs include temsirolimus (CCI-779), everolimus (RAD001), and ridaforolimus (AP-23573) (see Table D).

TABLE D
Representative mTOR Inhibitors

| Drug Name | CAS Number (IUPAC name) | Structure |
|---|---|---|
| Rapamycin | 53123-88-9 ((1R,9S,12S,15R,16E,18R,19R,21R, 23S,24E,26E,28E,30S,32S,35R)- 1,18-dihydroxy-12-{(2R)-1- [(1S,3R,4R)-4-hydroxy-3- methoxycyclohexyl]-2-propanyl}- 19,30-dimethoxy- 15,17,21,23,29,35-hexamethyl- 11,36-dioxa-4- azatricyclo[30.3.1.0~4,9~] hexatriaconta-16,24,26,28-tetraene- 2,3,10,14,20-pentone) | [chemical structure] |
| Temsirolimus | 162635-04-3 ((1R,2R,4S)-4-{(2R)- 2- [(3S,6R,7E,9R,10R,12R,14S,15E, 17E,19E,21S,23S,26R,27R,34aS)- 9,27-dihydroxy-10,21-dimethoxy- 6,8,12,14,20,26-hexamethyl- 1,5,11,28,29-pentaoxo- 1,4,5,6,9,10,11,12,13,14,21,22,23, 24,25,26,27,28,29,31,32,33,34,34a- tetracosahydro-3H-23,27- epoxypyrido[2,1- c][1,4]oxazacyclohentriacontin-3- yl]propyl}-2-methoxycyclohexyl 3- hydroxy-2-(hydroxymethyl)-2- methylpropanoate) | [chemical structure] |
| Everolimus (Afinitor, Zortress) | 159351-69-6 (Dihydroxy-12-[(2R)- 1-[(1S,3R,4R)-4-(2- hydroxyethoxy)-3- methoxycyclohexyl]propan-2-yl]- 19,30-dimethoxy- 15,17,21,23,29,35-hexamethyl- 11,36-dioxa-4-azatricyclo[30.3.1.0 hexatriaconta-16,24,26,28-tetraene- 2,3,10,14,20-pentone) | [chemical structure] |
| Ridaforolimus | 572924-54-0 ((1R,2R,4S)-4-[(2R)- 2- [(1R,9S,12S,15R,16E,18R,19R,21R, 23S,24E,26E,28Z,30S,32S,35R)- 1,18-dihydroxy-19,30-dimethoxy- 15,17,21,23,29,35-hexamethyl- 2,3,10,14,20-pentaoxo-11,36-dioxa- 4-azatricyclo [30.3.1.04,9]hexatriaconta- 16,24,26,28-tetraen-12- yl]propyl]-2-methoxycyclohexyl dimethylphosphinate) | [chemical structure] |

[0205] The term “mutation,” as used herein, refers to a substitution of a residue within a sequence, e.g., a nucleic acid or amino acid sequence, with another residue, or a deletion or insertion of one or more residues within a sequence. Mutations are typically described herein by identifying the original residue followed by the position of the residue within the sequence and by the identity of the newly substituted residue. Various methods for making the amino acid substitutions (mutations) provided herein are well known in the art, and are provided by, for example, Green and Sambrook, Molecular Cloning: A Laboratory Manual (4^{th} ed., Cold Spring Harbor Laboratory Press, Cold Spring Harbor, N.Y. (2012)).

[0206] “Neoplasia” refers to cells or tissues exhibiting abnormal growth or proliferation. The term neoplasia encompasses cancer, liquid, and solid tumors. In some embodiments, the neoplasia is a solid tumor. In other embodiments, the neoplasia is a liquid tumor. In some embodiments, the neoplasia is a hematological cancer. In some embodiments, the hematological cancer is leukemia, myeloma, and/or lymphoma. In some embodiments, the hematological cancer is a B cell cancer (e.g., a B cell lymphoma). In some embodiments, the B cell cancer is a lymphoma or a leukemia. In some cases, the leukemia comprises a pre-leukemia. In some instances, the neoplasia is a mantle cell lymphoma. In some cases, the leukemia is an acute leukemia. Acute leukemias include, for example, an acute myeloid leukemia (AML). Acute leukemias also include, for example, an acute lymphoid leukemia or an acute lymphocytic leukemia (ALL); ALL includes B-lineage ALL; T-lineage ALL; and T-cell acute lymphocytic leukemia (T-ALL).

[0207] The terms “nucleic acid” and “nucleic acid molecule,” as used herein, refer to a compound comprising a nucleobase and an acidic moiety, e.g., a nucleoside, a nucleotide, or a polymer of nucleotides. Typically, polymeric nucleic acids, e.g., nucleic acid molecules comprising three or more nucleotides are linear molecules, in which adjacent nucleotides are linked to each other via a phosphodiester linkage. In some embodiments, “nucleic acid” refers to individual nucleic acid residues (e.g. nucleotides and/or nucleosides). In some embodiments, “nucleic acid” refers to an oligonucleotide chain comprising three or more individual nucleotide residues. As used herein, the terms “oligonucleotide” and “polynucleotide” can be used interchangeably to refer to a polymer of nucleotides (e.g., a string of at least three nucleotides). In some embodiments, “nucleic acid” encompasses RNA as well as single and/or double-stranded DNA. Nucleic acids may be naturally occurring, for example, in the context of a genome, a transcript, an mRNA, tRNA, rRNA, siRNA, snRNA, a plasmid, cosmid, chromosome, chromatid, or other naturally occurring nucleic acid molecule. On the other hand, a nucleic acid molecule may be a non-naturally occurring molecule, e.g., a recombinant DNA or RNA, an artificial chromosome, an engineered genome, or fragment thereof, or a synthetic DNA, RNA, DNA/RNA hybrid, or including non-naturally occurring nucleotides or nucleosides. Furthermore, the terms “nucleic acid,” “DNA,” “RNA,” and/or similar terms include nucleic acid analogs, e.g., analogs having other than a phosphodiester backbone. Nucleic acids can be purified from natural sources, produced using recombinant expression systems and optionally purified, chemically synthesized, etc. Where appropriate, e.g., in the case of chemically synthesized molecules, nucleic acids comprise nucleoside analogs such as analogs having chemically modified bases or sugars, and backbone modifications. A nucleic acid sequence is presented in the 5′ to 3′ direction unless otherwise indicated. In some embodiments, a nucleic acid is or comprises natural nucleosides (e.g. adenosine, thymidine, guanosine, cytidine, uridine, deoxyadenosine, deoxythymidine, deoxyguanosine, and deoxycytidine); nucleoside analogs (e.g., 2-aminoadenosine, 2-thiothymidine, inosine, pyrrolo-pyrimidine, 3-methyl adenosine, 5-methylcytidine, 2-aminoadenosine, C5-bromouridine, C5-fluorouridine, C5-iodouridine, C5-propynyl-uridine, C5-propynyl-cytidine, C5-methylcytidine, 2-aminoadenosine, 7-deazaadenosine, 7-deazaguanosine, 8-oxoadenosine, 8-oxoguanosine, O(6)-methylguanine, and 2-thiocytidine); chemically modified bases; biologically modified bases (e.g., methylated bases); intercalated bases; modified sugars (e.g., 2′-fluororibose, ribose, 2′-deoxyribose, arabinose, and hexose); and/or modified phosphate groups (e.g., phosphorothioates and 5′-N-phosphoramidite linkages).

[0208] The term “nuclear localization sequence,” “nuclear localization signal,” or “NLS” refers to an amino acid sequence that promotes import of a protein into the cell nucleus. Nuclear localization sequences are known in the art and described, for example, in Plank et al., International PCT application, PCT/EP2000/011690, filed Nov. 23, 2000, published as WO/2001/038547 on May 31, 2001, the contents of which are incorporated herein by reference for their disclosure of exemplary nuclear localization sequences. In other embodiments, the NLS is an optimized NLS described, for example, by Koblan et al., Nature Biotech. 2018 doi:10.1038/nbt.4172. In some embodiments, an NLS comprises the amino acid sequence

(SEQ ID NO: 190)
KRTADGSEFESPKKKRKV,
(SEQ ID NO: 191)
KRPAATKKAGQAKKKK,
(SEQ ID NO: 192)
KKTELQTTNAENKTKKL,
(SEQ ID NO: 193)
KRGINDRNFWRGENGRKTR,
(SEQ ID NO: 194)
RKSGKIAAIVVKRPRK,
(SEQ ID NO: 195)
PKKKRKV,
(SEQ ID NO: 196)
MDSLLMNRRKFLYQFKNVRWAKGRRETYLC,
(SEQ ID NO: 328)
PKKKRKVEGADKRTADGSEFESPKKKRKV,
or
(SEQ ID NO: 329)
RKSGKIAAIVVKRPRKPKKKRKV.

[0209] The term “nucleobase,” “nitrogenous base,” or “base,” used interchangeably herein, refers to a nitrogen-containing biological compound that forms a nucleoside, which in turn is a component of a nucleotide. The ability of nucleobases to form base pairs and to stack one upon another leads directly to long-chain helical structures such as ribonucleic acid (RNA) and deoxyribonucleic acid (DNA). Five nucleobases—adenine (A), cytosine (C), guanine (G), thymine (T), and uracil (U)—are called primary or canonical. Adenine and guanine are derived from purine, and cytosine, uracil, and thymine are derived from pyrimidine. DNA and RNA can also contain other (non-primary) bases that are modified. Non-limiting exemplary modified nucleobases can include hypoxanthine, xanthine, 7-methylguanine, 5,6-dihydrouracil, 5-methylcytosine (m5C), and 5-hydromethylcytosine. Hypoxanthine and xanthine can be created through mutagen presence, both of them through deamination (replacement of the amine group with a carbonyl group). Hypoxanthine can be modified from adenine. Xanthine can be modified from guanine. Uracil can result from deamination of cytosine. A “nucleoside” consists of a nucleobase and a five carbon sugar (either ribose or deoxyribose). Examples of a nucleoside include adenosine, guanosine, uridine, cytidine, 5-methyluridine (m5U), deoxyadenosine, deoxyguanosine, thymidine, deoxyuridine, and deoxycytidine. Examples of a nucleoside with a modified nucleobase includes inosine (I), xanthosine (X), 7-methylguanosine (m7G), dihydrouridine (D), 5-methylcytidine (m5C), and pseudouridine (Ψ). A “nucleotide” consists of a nucleobase, a five carbon sugar (either ribose or deoxyribose), and at least one phosphate group. Non-limiting examples of modified nucleobases and/or chemical modifications that a modified nucleobase may include are the following: pseudo-uridine, 5-Methyl-cytosine, 2′-O-methyl-3′-phosphonoacetate, 2′-O-methyl thioPACE (MSP), 2′-O-methyl-PACE (MP), 2′-fluoro RNA (2′-F-RNA), constrained ethyl (S-cEt), 2′-O-methyl (‘M’), 2′-O-methyl-3′-phosphorothioate (‘MS’), 2′-O-methyl-3′-thiophosphonoacetate (‘MSP’), 5-methoxyuridine, phosphorothioate, and N1-Methylpseudouridine.

[0210] The term “nucleic acid programmable DNA binding protein” or “napDNAbp” may be used interchangeably with “polynucleotide programmable nucleotide binding domain” to refer to a protein that associates with a nucleic acid (e.g., DNA or RNA), such as a guide nucleic acid or guide polynucleotide (e.g., gRNA), that guides the napDNAbp to a specific nucleic acid sequence. In some embodiments, the polynucleotide programmable nucleotide binding domain is a polynucleotide programmable DNA binding domain. In some embodiments, the polynucleotide programmable nucleotide binding domain is a polynucleotide programmable RNA binding domain. In some embodiments, the polynucleotide programmable nucleotide binding domain is a Cas9 protein. A Cas9 protein can associate with a guide RNA that guides the Cas9 protein to a specific DNA sequence that is complementary to the guide RNA. In some embodiments, the napDNAbp is a Cas9 domain, for example a nuclease active Cas9, a Cas9 nickase (nCas9), or a nuclease inactive Cas9 (dCas9). Non-limiting examples of nucleic acid programmable DNA binding proteins include, Cas9 (e.g., dCas9 and nCas9), Cas12a/Cpfl, Cas12b/C2cl, Cas12c/C2c3, Cas12d/CasY, Cas12e/CasX, Cas12g, Cas12h, Cas12i, and Cas12j/CasΦ (Cas12j/Casphi). Non-limiting examples of Cas enzymes include Cas1, Cas1B, Cas2, Cas3, Cas4, Cas5, Cas5d, Cas5t, Cas5h, Cas5a, Cas6, Cas7, Cas8, Cas8a, Cas8b, Cas8c, Cas9 (also known as Csn1 or Csx12), Cas10, Cas10d, Cas12a/Cpfl, Cas12b/C2cl, Cas12c/C2c3, Cas12d/CasY, Cas12e/CasX, Cas12g, Cas12h, Cas12i, Cas12j/CasΦ, Cpf1, Csy1, Csy2, Csy3, Csy4, Cse1, Cse2, Cse3, Cse4, Cse5e, Csc1, Csc2, Csa5, Csn1, Csn2, Csm1, Csm2, Csm3, Csm4, Csm5, Csm6, Cmr1, Cmr3, Cmr4, Cmr5, Cmr6, Csb1, Csb2, Csb3, Csx17, Csx14, Csx10, Csx16, CsaX, Csx3, Csx1, Csx1S, Csx11, Csf1, Csf2, CsO, Csf4, Csd1, Csd2, Cst1, Cst2, Csh1, Csh2, Csa1, Csa2, Csa3, Csa4, Csa5, Type II Cas effector proteins, Type V Cas effector proteins, Type VI Cas effector proteins, CARF, DinG, homologues thereof, or modified or engineered versions thereof. Other nucleic acid programmable DNA binding proteins are also within the scope of this disclosure, although they may not be specifically listed in this disclosure. See, e.g., Makarova et al. “Classification and Nomenclature of CRISPR-Cas Systems: Where from Here?” CRISPR J. 2018 October; 1:325-336. doi: 10.1089/crispr.2018.0033; Yan et al., “Functionally diverse type V CRISPR-Cas systems” Science. 2019 Jan. 4; 363(6422):88-91. doi: 10.1126/science.aav7271, the entire contents of each are hereby incorporated by reference. Exemplary nucleic acid programmable DNA binding proteins and nucleic acid sequences encoding nucleic acid programmable DNA binding proteins are provided in the Sequence Listing as SEQ ID NOs: 197-231, 232-245, 254-257, 260, and 378. In some embodiments, the napDNAbp is a (CRISPR-associated system) Cas9 endonuclease, for example, Cas9 (Csnl) from Streptococcus pyogenes (e.g., SEQ ID NO: 197), Cas9 from Neisseria meningitidis (NmeCas9; SEQ ID NO: 208), Nme2Cas9 (SEQ ID NO: 209), Streptococcus constellatus (ScoCas9), or derivatives thereof (e.g., a sequence with at least about 85% sequence identity to a Cas9, such as Nme2Cas9 or spCas9).

[0211] The terms “nucleobase editing domain” or “nucleobase editing protein,” as used herein, refers to a protein or enzyme that can catalyze a nucleobase modification in RNA or DNA, such as cytosine (or cytidine) to uracil (or uridine) or thymine (or thymidine), and adenine (or adenosine) to hypoxanthine (or inosine) deaminations, as well as non-templated nucleotide additions and insertions. In some embodiments, the nucleobase editing domain is a deaminase domain (e.g., an adenine deaminase or an adenosine deaminase; or a cytidine deaminase or a cytosine deaminase).

[0212] As used herein, “obtaining” as in “obtaining an agent” includes synthesizing, purchasing, or otherwise acquiring the agent.

[0213] By “subject” or “patient” is meant a mammal, including, but not limited to, a human or non-human mammal. In embodiments, the mammal is a bovine, equine, canine, ovine, rabbit, rodent, nonhuman primate, or feline. In an embodiment, “patient” refers to a mammalian subject with a higher than average likelihood of developing a disease or a disorder. Exemplary patients can be humans, non-human primates, cats, dogs, pigs, cattle, cats, horses, camels, llamas, goats, sheep, rodents (e.g., mice, rabbits, rats, or guinea pigs) and other mammalians that can benefit from the therapies disclosed herein. Exemplary human patients can be male and/or female.

[0214] “Patient in need thereof” or “subject in need thereof” is referred to herein as a patient diagnosed with, at risk or having, predetermined to have, or suspected of having a disease or disorder.

[0215] The terms “pathogenic mutation”, “pathogenic variant”, “disease causing mutation”, “disease causing variant”, “deleterious mutation”, or “predisposing mutation” refers to a genetic alteration or mutation that is associated with a disease or disorder or that increases an individual's susceptibility or predisposition to a certain disease or disorder. In some embodiments, the pathogenic mutation comprises at least one wild-type amino acid substituted by at least one pathogenic amino acid in a protein encoded by a gene. In some embodiments, the pathogenic mutation is in a terminating region (e.g., stop codon). In some embodiments, the pathogenic mutation is in a non-coding region (e.g., intron, promoter, etc.).

[0216] By “persistence” in the context of an allogeneic transplant is meant the continued survival of a donor cell in a host organism. In some embodiments, allogeneic cell(s) comprising one or more of the edits described herein (e.g., a base edit in a CD5, CD3e, CD3g, B2M, and/or CIITA gene, or regulatory element(s) thereof; or knockdown of a CD5, TCRαβ, B2M, and/or CIITA polypeptide) persist in a subject allogeneic to the cells at higher levels over time post-infusion than corresponding unedited allogeneic control cells. In embodiments, the percentage of edited cells (e.g., T cells, NK cells, or lymphocytes) persisting in a subject at a given time point (e.g., 7 days, 14 days, 1 month, 3 months, 6 months, 9 months, or greater than 1, 2, or 3 years is at least about 10%, 15%, 20%, 25%, 30%, 35%, 40%, 45%, 50%, 60%, 70%, 80%, 90%, 95%, 99%, or 100% greater than the level of unedited control cells at the same time point. A cell(s) modified by methods of the present disclosure are more persistent than a reference unmodified cell(s).

[0217] The terms “protein”, “peptide”, “polypeptide”, and their grammatical equivalents are used interchangeably herein, and refer to a polymer of amino acid residues linked together by peptide (amide) bonds. A protein, peptide, or polypeptide can be naturally occurring, recombinant, or synthetic, or any combination thereof.

[0218] The term “fusion protein” as used herein refers to a hybrid polypeptide, which comprises protein domains from at least two different proteins.

[0219] By “rBE4 polypeptide” is meant a polypeptide sharing at least 85% amino acid sequence identity to the below amino acid sequence and having cytidine base editor activity.

(SEQ ID NO: 485)
MSSETGPVAVDPTLRRRIEPHEFEVFFDPRELRKETCLLYEINWGGRHS
IWRHTSQNTNKHVEVNFIEKFTTERYFCPNTRCSITWFLSWSPCGECSR
AITEFLSRYPHVTLFIYIARLYHHADPRNRQGLRDLISSGVTIQIMTEQ
ESGYCWRNFVNYSPSNEAHWPRYPHLWVRLYVLELYCIILGLPPCLNIL
RRKQPQLTFFTIALQSCHYQRLPPHILWATGLKSGGSSGGSSGSETPGT
SESATPESSGGSSGGSDKKYSIGLAIGTNSVGWAVITDEYKVPSKKFKV
LGNTDRHSIKKNLIGALLFDSGETAEATRLKRTARRRYTRRKNRICYLQ
EIFSNEMAKVDDSFFHRLEESFLVEEDKKHERHPIFGNIVDEVAYHEKY
PTIYHLRKKLVDSTDKADLRLIYLALAHMIKFRGHFLIEGDLNPDNSDV
DKLFIQLVQTYNQLFEENPINASGVDAKAILSARLSKSRRLENLIAQLP
GEKKNGLFGNLIALSLGLTPNFKSNFDLAEDAKLQLSKDTYDDDLDNLL
AQIGDQYADLFLAAKNLSDAILLSDILRVNTEITKAPLSASMIKRYDEH
HQDLTLLKALVRQQLPEKYKEIFFDQSKNGYAGYIDGGASQEEFYKFIK
PILEKMDGTEELLVKLNREDLLRKQRTFDNGSIPHQIHLGELHAILRRQ
EDFYPFLKDNREKIEKILTFRIPYYVGPLARGNSRFAWMTRKSEETITP
WNFEEVVDKGASAQSFIERMTNFDKNLPNEKVLPKHSLLYEYFTVYNEL
TKVKYVTEGMRKPAFLSGEQKKAIVDLLFKTNRKVTVKQLKEDYFKKIE
CFDSVEISGVEDRFNASLGTYHDLLKIIKDKDFLDNEENEDILEDIVLT
LTLFEDREMIEERLKTYAHLFDDKVMKQLKRRRYTGWGRLSRKLINGIR
DKQSGKTILDFLKSDGFANRNFMQLIHDDSLTFKEDIQKAQVSGQGDSL
HEHIANLAGSPAIKKGILQTVKVVDELVKVMGRHKPENIVIEMARENQT
TQKGQKNSRERMKRIEEGIKELGSQILKEHPVENTQLQNEKLYLYYLQN
GRDMYVDQELDINRLSDYDVDHIVPQSFLKDDSIDNKVLTRSDKNRGKS
DNVPSEEVVKKMKNYWRQLLNAKLITQRKFDNLTKAERGGLSELDKAGF
IKRQLVETRQITKHVAQILDSRMNTKYDENDKLIREVKVITLKSKLVSD
FRKDFQFYKVREINNYHHAHDAYLNAVVGTALIKKYPKLESEFVYGDYK
VYDVRKMIAKSEQEIGKATAKYFFYSNIMNFFKTEITLANGEIRKRPLI
ETNGETGEIVWDKGRDFATVRKVLSMPQVNIVKKTEVQTGGFSKESILP
KRNSDKLIARKKDWDPKKYGGFDSPTVAYSVLVVAKVEKGKSKKLKSVK
ELLGITIMERSSFEKNPIDFLEAKGYKEVKKDLIIKLPKYSLFELENGR
KRMLASAGELQKGNELALPSKYVNFLYLASHYEKLKGSPEDNEQKQLFV
EQHKHYLDEIIEQISEFSKRVILADANLDKVLSAYNKHRDKPIREQAEN
IIHLFTLTNLGAPAAFKYFDTTIDRKRYTSTKEVLDATLIHQSITGLYE
TRIDLSQLGGDSGGSGGSGGSTNLSDIIEKETGKQLVIQESILMLPEEV
EEVIGNKPESDILVHTAYDESTDENVMLLTSDAPEYKPWALVIQDSNGE
NKIKMLSGGSGGSGGSTNLSDIIEKETGKQLVIQESILMLPEEVEEVIG
NKPESDILVHTAYDESTDENVMLLTSDAPEYKPWALVIQDSNGENKIKM
LSGGSKRTADGSEFESPKKKRKVE.

[0220] By “rBE4 polynucleotide” is meant a polynucleotide encoding a rBE4 polypeptide.

[0221] The term “recombinant” as used herein in the context of proteins or nucleic acids refers to proteins or nucleic acids that do not occur in nature, but are the product of human engineering. For example, in some embodiments, a recombinant protein or nucleic acid molecule comprises an amino acid or nucleotide sequence that comprises at least one, at least two, at least three, at least four, at least five, at least six, or at least seven mutations as compared to any naturally occurring sequence.

[0222] By “reduces” is meant a negative alteration of at least 10%, 25%, 50%, 75%, or 100%.

[0223] By “reference” is meant a standard or control condition. In one embodiment, the reference is a cell (e.g., a CAR-T cell) not base edited according to the methods provided herein. In other embodiments and without limitation, a reference is an untreated cell that is not subjected to a test condition, or is subjected to placebo or normal saline, medium, buffer, a control polynucleotide that does not encode a polypeptide of interest, and/or a control vector that does not harbor a polynucleotide of interest. In some cases, a reference is a healthy subject, such as a subject not having a neoplasia or a subject having a neoplasia and not treated for the neoplasia according to a method provided herein. In some embodiments, the reference is a cell lacking a nucleobase alteration and/or having an additional nucleobase alteration. The reference may be a cell that does not express one or more of the polypeptides described herein. The reference may be a subject before administration of a composition provided herein or treated according to a method provided herein and/or the subject before a change in a treatment (e.g., an alteration in dose or agent administered to the subject).

[0224] A “reference sequence” is a defined sequence used as a basis for sequence comparison. A reference sequence may be a subset of or the entirety of a specified sequence; for example, a segment of a full-length cDNA or gene sequence, or the complete cDNA or gene sequence. For polypeptides, the length of the reference polypeptide sequence will generally be at least about 16 amino acids, at least about 20 amino acids, at least about 25 amino acids, about 35 amino acids, about 50 amino acids, or about 100 amino acids. For nucleic acids, the length of the reference nucleic acid sequence will generally be at least about 50 nucleotides, at least about 60 nucleotides, at least about 75 nucleotides, about 100 nucleotides or about 300 nucleotides or any integer thereabout or therebetween. In some embodiments, a reference sequence is a wild-type sequence of a protein of interest. In other embodiments, a reference sequence is a polynucleotide sequence encoding a wild-type protein.

[0225] The term “RNA-programmable nuclease,” and “RNA-guided nuclease” refer to a nuclease that forms a complex with (e.g., binds or associates with) one or more RNA(s) that is not a target for cleavage. In some embodiments, an RNA-programmable nuclease, when in a complex with an RNA, may be referred to as a nuclease-RNA complex. Typically, the bound

[0226] RNA(s) is referred to as a guide RNA (gRNA). In some embodiments, the RNA-programmable nuclease is the (CRISPR-associated system) Cas9 endonuclease, for example, Cas9 (Csnl) from Streptococcus pyogenes (e.g., SEQ ID NO: 197), Cas9 from Neisseria meningitidis (NmeCas9; SEQ ID NO: 208), Nme2Cas9 (SEQ ID NO: 209), Streptococcus constellatus (ScoCas9), or derivatives thereof (e.g. a sequence with at least about 85% sequence identity to a Cas9, such as Nme2Cas9 or spCas9).

[0227] As used herein, the term “scFv” refers to a single chain Fv antibody in which the variable domains of the heavy chain and the light chain from an antibody have been joined to form one chain. scFv fragments contain a single polypeptide chain that includes the variable region of an antibody light chain (VL) (e.g., CDR-L1, CDR-L2, and/or CDR-L3) and the variable region of an antibody heavy chain (VH) (e.g., CDR-H1, CDR-H2, and/or CDR-H3) separated by a linker. The linker that joins the VL and VH regions of a scFv fragment can be a peptide linker composed of proteinogenic amino acids. Alternative linkers can be used to so as to increase the resistance of the scFv fragment to proteolytic degradation (for example, linkers containing D-amino acids), in order to enhance the solubility of the scFv fragment (for example, hydrophilic linkers such as polyethylene glycol-containing linkers or polypeptides containing repeating glycine and serine residues), to improve the biophysical stability of the molecule (for example, a linker containing cysteine residues that form intramolecular or intermolecular disulfide bonds), or to attenuate the immunogenicity of the scFv fragment (for example, linkers containing glycosylation sites). It will also be understood by one of ordinary skill in the art that the variable regions of the scFv molecules described herein can be modified such that they vary in amino acid sequence from the antibody molecule from which they were derived. For example, nucleotide or amino acid substitutions leading to conservative substitutions or changes at amino acid residues can be made (e.g., in CDR and/or framework residues) so as to preserve or enhance the ability of the scFv to bind to the antigen recognized by the corresponding antibody. By “specifically binds” is meant a nucleic acid molecule, polypeptide, polypeptide/polynucleotide complex, compound, or molecule that recognizes and binds a polypeptide and/or nucleic acid molecule of the disclosure, but which does not substantially recognize and bind other molecules in a sample, for example, a biological sample.

[0228] By “substantially identical” is meant a polypeptide or nucleic acid molecule exhibiting at least 50% identity to a reference amino acid sequence. In one embodiment, a reference sequence is a wild-type amino acid or nucleic acid sequence. In another embodiment, a reference sequence is any one of the amino acid or nucleic acid sequences described herein. In one embodiment, such a sequence is at least about 60%, 80%, 85%, 90%, 95%, 96%, 97%, 98%, 99%, 99.9%, or even 99.99%, identical at the amino acid level or nucleic acid level to the sequence used for comparison.

[0229] Sequence identity is typically measured using sequence analysis software (for example, Sequence Analysis Software Package of the Genetics Computer Group, University of Wisconsin Biotechnology Center, 1710 University Avenue, Madison, Wis. 53705, BLAST, BESTFIT, GAP, or PILEUP/PRETTYBOX programs). Such software matches identical or similar sequences by assigning degrees of homology to various substitutions, deletions, and/or other modifications. Conservative substitutions typically include substitutions within the following groups: glycine, alanine; valine, isoleucine, leucine; aspartic acid, glutamic acid, asparagine, glutamine; serine, threonine; lysine, arginine; and phenylalanine, tyrosine.

[0230] Nucleic acid molecules useful in the methods of the disclosure include any nucleic acid molecule that encodes a polypeptide of the disclosure or a functional fragment thereof. Such nucleic acid molecules need not be 100% identical with an endogenous nucleic acid sequence, but will typically exhibit substantial identity. Polynucleotides having “substantial identity” to an endogenous sequence are typically capable of hybridizing with at least one strand of a double-stranded nucleic acid molecule. Nucleic acid molecules useful in the methods of the disclosure include any nucleic acid molecule that encodes a polypeptide of the disclosure or a functional fragment thereof. Such nucleic acid molecules need not be 100% identical with an endogenous nucleic acid sequence, but will typically exhibit substantial identity. Polynucleotides having “substantial identity” to an endogenous sequence are typically capable of hybridizing with at least one strand of a double-stranded nucleic acid molecule. By “hybridize” is meant pair to form a double-stranded molecule between complementary polynucleotide sequences (e.g., a gene described herein), or portions thereof, under various conditions of stringency. (See, e.g., Wahl, G. M. and S. L. Berger (1987) Methods Enzymol. 152:399; Kimmel, A. R. (1987) Methods Enzymol. 152:507).

[0231] By “split” is meant divided into two or more fragments.

[0232] A “split polypeptide” or “split protein” refers to a protein that is provided as an N-terminal fragment and a C-terminal fragment translated as two separate polypeptides from a nucleotide sequence(s). The polypeptides corresponding to the N-terminal portion and the C-terminal portion of the split protein may be spliced in some embodiments to form a “reconstituted” protein. In some embodiments, the split polypeptide is a nucleic acid programmable DNA binding protein (e.g., a Cas9) or a base editor.

[0233] The term “target site” refers to a nucleotide sequence or nucleobase of interest within a nucleic acid molecule that is modified. In embodiments, the modification is deamination of a base. The deaminase can be a cytidine or an adenine deaminase. The fusion protein or base editing complex comprising a deaminase may comprise a dCas9-adenosine deaminase fusion protein, a Cas 12b-adenosine deaminase fusion, or a base editor disclosed herein.

[0234] As used herein, the terms “treat,” treating,” “treatment,” and the like refer to reducing or ameliorating a disorder and/or symptoms associated therewith or obtaining a desired pharmacologic and/or physiologic effect. It will be appreciated that, although not precluded, treating a disorder or condition does not require that the disorder, condition or symptoms associated therewith be completely eliminated. In some embodiments, the effect is therapeutic, i.e., without limitation, the effect partially or completely reduces, diminishes, abrogates, abates, alleviates, reduces the intensity of, or cures a disease and/or adverse symptom attributable to the disease. In some embodiments, the effect is preventative, i.e., the effect protects or prevents an occurrence or reoccurrence of a disease or condition. To this end, the presently disclosed methods comprise administering a therapeutically effective amount of a composition as described herein.

[0235] By “uracil glycosylase inhibitor” or “UGI” is meant an agent that inhibits the uracil-excision repair system. Base editors comprising a cytidine deaminase convert cytosine to uracil, which is then converted to thymine through DNA replication or repair. In various embodiments, a uracil DNA glycosylase (UGI) prevent base excision repair which changes the U back to a C. In some instances, contacting a cell and/or polynucleotide with a UGI and a base editor prevents base excision repair which changes the U back to a C. An exemplary UGI comprises an amino acid sequence as follows:

>splP14739IUNGI_BPPB2 Uracil-DNA Glycosylase Inhibitor

(SEQ ID NO: 231)
MTNLSDIIEKETGKQLVIQESILMLPEEVEEVIGNKPESDILVHTAYDE
STDENVMLLTSDAPEYKPWALVIQDSNGENKIKML.

[0236] In some embodiments, the agent inhibiting the uracil-excision repair system is a uracil stabilizing protein (USP). See, e.g., WO 2022015969 A1, incorporated herein by reference.

[0237] As used herein, the term “vector” refers to a means of introducing a nucleic acid molecule into a cell, resulting in a transformed cell. Vectors include plasmids, transposons, phages, viruses, liposomes, lipid nanoparticles, and episomes.

[0238] Ranges provided herein are understood to be shorthand for all of the values within the range. For example, a range of 1 to 50 is understood to include any number, combination of numbers, or sub-range from the group consisting 1, 2, 3, 4, 5, 6, 7, 8, 9, 10, 11, 12, 13, 14, 15, 16, 17, 18, 19, 20, 21, 22, 23, 24, 25, 26, 27, 28, 29, 30, 31, 32, 33, 34, 35, 36, 37, 38, 39, 40, 41, 42, 43, 44, 45, 46, 47, 48, 49, or 50.

[0239] The recitation of a listing of chemical groups in any definition of a variable herein includes definitions of that variable as any single group or combination of listed groups. The recitation of an embodiment for a variable or aspect herein includes that embodiment as any single embodiment or in combination with any other embodiments or portions thereof.

[0240] All terms are intended to be understood as they would be understood by a person skilled in the art. Unless defined otherwise, all technical and scientific terms used herein have the same meaning as commonly understood by one of ordinary skill in the art to which the disclosure pertains

[0241] In this application, the use of the singular includes the plural unless specifically stated otherwise. It must be noted that, as used in the specification, the singular forms “a,” “an” and “the” include plural referents unless the context clearly dictates otherwise. In this application, the use of “or” means “and/or” unless stated otherwise. Furthermore, use of the term “including” as well as other forms, such as “include”, “includes,” and “included,” is not limiting.

[0242] As used in this specification and claim(s), the words “comprising” (and any form of comprising, such as “comprise” and “comprises”), “having” (and any form of having, such as “have” and “has”), “including” (and any form of including, such as “includes” and “include”) or “containing” (and any form of containing, such as “contains” and “contain”) are inclusive or open-ended. This wording indicates that specified elements, features, components, and/or method steps are present, but does not exclude the presence of other elements, features, components, and/or method steps. Any embodiments specified as “comprising” a particular component(s) or element(s) are also contemplated as “consisting of” or “consisting essentially of” the particular component(s) or element(s) in some embodiments. It is contemplated that any embodiment discussed in this specification can be implemented with respect to any method or composition of the present disclosure, and vice versa. Furthermore, compositions of the present disclosure can be used to achieve methods of the present disclosure.

[0243] The term “about” or “approximately” means within an acceptable error range for the particular value as determined by one of ordinary skill in the art, which will depend in part on how the value is measured or determined, i.e., the limitations of the measurement system.

[0244] Reference in the specification to “some embodiments,” “an embodiment,” “one embodiment” or “other embodiments” means that a particular feature, structure, or characteristic described in connection with the embodiments is included in at least some embodiments, but not necessarily all embodiments, of the present disclosures.

### BRIEF DESCRIPTION OF THE DRAWINGS

[0245] FIGS. 1A and 1B provide a schematic diagram and flow cytometry scatter plots demonstrating that rapamycin and tacrolimus inhibited the priming and proliferation of alloreactive T cells in response to HLA class I mismatched peripheral blood mononuclear cells. FIG. 1A provides a schematic diagram summarizing the experiment carried out to obtain the data shown in FIG. 1B. Purified primary human T cells (effector cells) from a donor (Donor #1) were labeled with CellTrace™ dye and co-cultured at a 1:1 effector-to-target cell ratio with HLA-mismatched peripheral blood mononuclear cells (PBMCs) from another donor (Donor #2) that were pretreated with mitomycin C to inhibit their growth (mitomycin C inhibits cell growth). The cells were co-cultured in the presence of the immunosuppressant rapamycin (0.001 μg/mL) or tacrolimus (0.1 μg/mL) or in the presence of dimethylsulfoxide (DMSO) in place of any immunosuppressant. The immunosuppressant or DMSO was re-administered to the cultures every 48 hours. On day 7, proliferation was measured as dilution of the CellTrace™ dye assessed using flow cytometry. The numbers at the lower-left of each plot indicate the percent of total cells counted falling within the indicated region.

[0246] FIG. 2 provides a series of flow cytometry scatter plots demonstrating that NK cell-mediated lysis of HLA class-I negative T cells is attenuated in the presence of the immunosuppressant rapamycin or tacrolimus. The rightmost plots represent the ratio of HLA class-I negative (target cells) and positive T cells in the absence of any NK cells (effector cells) (i.e., a culture with an effector-to-target cell ratio (E:T) of 0:1 because the culture contained no effector cells and only the target cells). Primary human NK cells were activated in vitro with IL-2 and IL-15 cytokines for 72 hours. The activated NK cells were then cultured for 24 hours in the presence of rapamycin (10 μg/mL), tacrolimus (10 μg/mL), or a dimethylsulfoxide (DMSO) control. After the 24 hours, the NK cells were then co-cultured at a 4:1 effector-to-target ratio with an equal mixture of unedited HLA class-I positive (off-target cells) or beta-2-microglobulin (B2M) knock-out (HLA class-I deficient) T cells (target cells) in the presence or absence if the immunosuppressant rapamycin or tacrolimus. T cells co-cultured in the absence of NK cells (0:1 E:T ratio) were used as control. Following 48 hours of co-culture, the frequency of HLA class-I negative and positive T cells was assessed using flow cytometry by immunostaining for pan HLA class-I (ABC). The numbers within each plot indicate the percent of total cells counted falling within the indicated region, where the left regions correspond to HLA class-I negative cells and the right regions correspond to HLA class-I positive cells.

[0247] FIG. 3 provides a bar graph showing maximum A to G and C to T base editing within an FKBP1A polynucleotide achieved using base editor systems containing one of the guide polynucleotides indicated along the x-axis (see Table 1 for nucleotide sequences) and either an adenosine deaminase base editor (ABE) or a cytidine deaminase base editor (CBE), as indicated. The ABE was ABE8.20m and the CBE was rBE4. Primary human T cells were thawed and activated in vitro using an anti-CD3/CD28/CD2 reagent. On day 2 following contacting with the reagent, the T cells were washed and resuspended in P3 Buffer (Lonza) and plated in 96-well electroporation plates containing 2 μg ABE8.20m or rBE4 (CBE) and 2 μg of the indicated guide polynucleotide targeting the FKBP1A (FKBP prolyl isomerase 1A) polynucleotide. Plates were electroporated using a DH-102 setting on a Lonza Nucleofector™ 96-well plate unit. The electroporated cells were incubated for 3 days. Following the 3-day incubation, the cells were harvested, genomic DNA was extracted, and next-generation sequencing was carried out on the genomic DNA to determine frequencies of base pair conversion within the FKBP1A polynucleotide.

[0248] FIG. 4 provides Western blot analysis images demonstrating knock-out of FKBP1A protein expression in T cells edited using a base editor system containing the base editor ABE8.20m and a TSBT×1538 sgRNA. Primary human T cells were activated with anti-CD3/CD28/CD2 reagent. On day 2 following contacting with the reagent, the T cells were contacted with the TSBT×1538 sgRNA and ABE8.20m and subsequently incubated for approximately 5 days. Unedited cells were used as a negative control. Following the approximately 5-day incubation, the cells were harvested and cell-associated protein was extracted to be evaluated in the Western blot analysis. Protein samples from the edited and unedited cells were contacted with a rabbit anti-FKBP1A or mouse anti-GAPDH (control used to normalize protein concentrations) antibodies, followed by staining with secondary anti-rabbit (HRP) and anti-mouse (NIR) antibodies, respectively. Protein was analyzed using the Jess automated Western blot analysis device available from ProteinSimple.

[0249] FIG. 5 provides a bar graph showing maximum A to G and C to T base editing within an NR3C1 polynucleotide achieved using base editor systems containing one of the guide polynucleotides indicated along the x-axis (see Table 1 for nucleotide sequences) and either an adenosine deaminase base editor (ABE) or a cytidine deaminase base editor (CBE), as indicated. The ABE was ABE8.20m and the CBE was rBE4. Primary human T cells were thawed and activated in vitro using an anti-CD3/CD28/CD2 reagent. On day 2 following contacting with the reagent, the T cells were washed and resuspended in P3 Buffer (Lonza) and plated in 96-well electroporation plates containing 2 μg mRNA encoding ABE8.20m or rBE4 (CBE) and 2 μg of the indicated guide polynucleotide targeting the NR3C1 (nuclear receptor subfamily 3 group C member 1) polynucleotide. Plates were electroporated using a DH-102 setting on a Lonza Nucleofector™ 96-well plate unit. The electroporated cells were incubated for 3 days. Following the 3-day incubation, the cells were harvested, genomic DNA was extracted, and next-generation sequencing was carried out on the genomic DNA to determine frequencies of base pair conversion within the NR3C1 polynucleotide.

[0250] FIG. 6 provides a bar graph showing maximum A to G base editing within a PPIA polynucleotide achieved using base editor systems containing one of the guide polynucleotides indicated along the x-axis (see Table 1 for nucleotide sequences) and an adenosine deaminase base editor (ABE). The ABE was ABE8.20m. Primary human T cells were thawed and activated in vitro using an anti-CD3/CD28/CD2 reagent. On day 2 following contacting with the reagent, the T cells were washed and resuspended in P3 Buffer (Lonza) and plated in 96-well electroporation plates containing 2 μg ABE8.20m and 2 μg of the indicated guide polynucleotide targeting the PPIA (peptidylprolyl isomerase A) polynucleotide. Plates were electroporated using a DH-102 setting on a Lonza Nucleofector™ 96-well plate unit. The electroporated cells were incubated in 24-well GRex™ (Wilson Wolf) plates for 5 days. Following the 5-day incubation, the cells were harvested, genomic DNA was extracted, and next-generation sequencing was carried out on the genomic DNA to determine frequencies of base pair conversion within the PPIA polynucleotide.

[0251] FIG. 7 provides a set of overlaid flow cytometry histograms confirming knock-out of PPIA protein expression in primary human T cells edited using base editor systems containing

[0252] ABE8.20m and the guide polynucleotide TSBT×6143 or TSBT×6146 (see Table 1 for nucleotide sequences). Five days following being contacted with the base editor systems, the T cells were stained using LIVE/DEAD™ Fixable Near-Infra Red (NIR) stain (Thermo). The cells were then fixed and permeabilized followed by immunostaining using a primary antibody targeting PPIA (polyclonal Cyclophilin A Antibody from ProteinTech; 10720-1-AP). The cells were then contacted with a secondary antibody (polyclonal Goat anti-Rabbit IgG (H+L) Cross-Adsorbed Secondary Antibody labeled using Alexa Fluor™ 488 and available from Invitrogen; A-11008) and analyzed using flow cytometry. Unedited cells and isotype control antibody stained cells were used as controls representing high and low levels of PPIA protein, respectively. The x-axis of FIG. 7 indicates the level of PPIA protein measured. In FIG. 7, the y-axis represents cell counts normalized to the mode cell count measured for PPIA expression levels in a sample (i.e., the most frequently counted expression level was set to have a total cell count value (y-axis value) equal to 100).

[0253] FIG. 8 provides plots demonstrating that primary human anti-CD19 CAR-T cells edited using a base editor system containing the base editor ABE8.20m and the guide polynucleotide TSBT×1538 to reduce expression of FKBP1A showed improved proliferation in the presence of rapamycin relative to unedited anti-CD19 CAR-T cells. Primary human T cells were activated using an anti-CD3/CD28/CD2 reagent. Two-days after being contacted with the reagent, the T cells were edited using a base editor system containing the guide polynucleotide TSBT×1538 and the base editor ABE8.20m using electroporation, as described above. Following electroporation, both the T cells were transduced with a lentiviral vector encoding an anti-CD19 CAR (19CAR) and allowed to expand in culture for approximately 7 days before being cryopreserved for later analysis. Unedited anti-CD19 CAR-T cells were prepared as a negative control. The 19CAR-T cells were then thawed from cryopreservation and rested overnight before being stimulated using dynabeads coated with recombinant human CD19 protein-coated at a bead-to-cell ratio of 1:1. The T cells were cultured in the presence of 100 nM of the immunosuppressant rapamycin or dimethylsulfoxide (DMSO) as a control for 6 days. The total number of T cells were enumerated using a NucleoCounter NC-200™ automated cell counter.

[0254] FIG. 9 provides flow cytometry histograms demonstrating that 19CAR-T cells edited to reduce FKB1A protein expression using a base editor system containing the guide TSBT×1538 and the base editor ABE8.20m showed improved cell proliferation in response to a universal T cell activator relative to unedited 19CAR-T cells. Primary human T cells were activated using an anti-CD3/CD28/CD2 reagent. Two days after being contacted with the reagent, the T cells were edited using a base editor system containing the guide polynucleotide TSBT×1538 and the base editor ABE8.20m using the electroporation protocol described above. Both edited and unedited T cells were transduced with a lentiviral vector encoding an anti-CD19 CAR (19CAR) and allowed to expand in culture for approximately 7 days before being cryopreserved for later analysis. Unedited 19CAR-T cells were used as a control. For analysis, the 19CAR-T cells were thawed and rested for 72 hours before labeling using a CellTrace™ Far Red (CTFR) dye. After CTFR labeling, the 19CAR-T cells were stimulated using an Immunocult™ Human CD3/CD28/CD2 universal T cell activator in the presence of 100 nM of the immunosuppressant agent rapamycin or in the presence of DMSO (control) and allowed to incubate for an additional 3 days. Following the three-day incubation, the T cells were analyzed using flow cytometry to measure dilution of CTFR dye as an indicator of cell proliferation.

[0255] FIG. 10 provides flow cytometry contour plots demonstrating that CD4+ 19CAR-T cells edited to reduce FKBP1A protein expression using a base editor system containing the guide polynucleotide TSBT×1538 and the base editor ABE8.20m showed improved cytokine production levels (IFNg and TNFa) when contacted with target cells in the presence of an immunosuppressant agent relative to unedited CD4+ 19CAR-T cells. Unedited (control) and edited 19CAR-T cells were thawed from cryopreservation and rested overnight in the presence of the immunosuppressant rapamycin (RPM; 100 ng/mL) or tacrolimus (TCR; 100 ng/mL), or in the presence of DMSO (control). The following day, the 19CAR-T cells were stimulated by being contacted with CD19⁺ Jeko-1 tumor cells for 6 hours in the presence of 100 ng/ml of an immunosuppressant agent, as indicated in FIG. 10. Monensin and Brefeldin A were added to the cell cultures to inhibit protein secretion for the duration of the stimulation. After the 6 hours, the cells were stained with reagents against 19CAR, CD4, CD8, IFNg, and TNFa, and the cells were also stained using a viability stain. Fluorescence activated cell sorting (FACS) was then used to measure intracellular levels of IFNg (y-axis) and TNFa (x-axis) in CD4⁺ 19CAR-T cells. In FIG. 10, the numbers in each quadrant of each contour plot represent the percent of total cells counted that fell within the quadrant.

[0256] FIG. 11 provides flow cytometry contour plots demonstrating that CD8+ 19CAR-T cells edited to reduce FKBP1A protein expression using a base editor system containing the guide polynucleotide TSBT×1538 and the base editor ABE8.20m showed improved cytokine production levels (IFNg and TNFa) when contacted with target cells in the presence of an immunosuppressant agent relative to unedited CD8+ 19CAR-T cells. Unedited (control) and edited 19CAR-T cells were thawed from cryopreservation and rested overnight in the presence of the immunosuppressant rapamycin (RPM; 100 ng/mL) or tacrolimus (TCR; 100 ng/mL), or in the presence of DMSO (control). The following day, the 19CAR-T cells were stimulated by being contacted with CD19+Jeko-1 tumor cells for 6 hours in the presence of 100 ng/mL of an immunosuppressant agent, as indicated in FIG. 10. Monensin and Brefeldin A were added to the cell cultures to inhibit protein secretion for the duration of the stimulation. After the 6 hours, the cells were stained with reagents against 19CAR, CD4, CD8, IFNg, and TNFa, and the cells were also stained using a viability stain. Fluorescence activated cell sorting (FACS) was then used to measure intracellular levels of IFNg (y-axis) and TNFa (x-axis) in CD8⁺ 19CAR-T cells. In FIG. 10, the numbers in each quadrant of each contour plot represent the percent of total cells counted that fell within the quadrant.

[0257] FIGS. 12A and 12B provide plots demonstrating that anti-CD19 CAR (19CAR)-T cells edited to reduce FKBP1A protein expression using a base editor system containing the guide polynucleotide TSBT×1538 and the base editor ABE8.20m showed improved cytotoxicity (i.e., lysis of target CD19+ Jeko-1 tumor cells) in vitro when contacted with target cells in the presence of an immunosuppressant agent relative to unedited CD8+ 19CAR-T cells. Unedited and edited 19CAR-T cells were thawed from cryopreservation and rested overnight in the presence of the immunosuppressant rapamycin (100 nM) or tacrolimus (100 ng/ml). The following day, the 19CAR-T cells were co-cultured with green fluorescent protein-expressing (GFP⁺) Jeko-1 tumor cells at a 0.25:1 effector-to-target cell ratio. Rapamycin (100 nM) and tacrolimus (100 ng/mL) were added to the cultures at 0 hr, 48 hr, 96 hr, and 144 hr post co-culture (vertical dashed lines). Tumor associated GFP fluorescence (y-axis) was longitudinally quantified in real-time in 4-hour intervals (x-axis) by using an Incucyte™ Live-Cell Analysis System (Sartorius). Tumor cells alone were used as a control. Co-cultures were evaluated in biological triplicates. The data points in FIGS. 12A and 12B indicate mean measurements and the error bars represent one standard deviation (SD) from the mean. In FIGS. 12A and 12B, “GCU” represents “Green Calibrated Unit.”

[0258] FIGS. 13A and 13B provide plots demonstrating that anti-CD19 CAR (19CAR)-T cells edited to reduce FKBP1A protein expression using a base editor system containing the guide polynucleotide TSBT×1538 and the base editor ABE8.20m showed improved cytotoxicity (i.e., lysis of target CD19+ Jeko-1 tumor cells) in Jeko-1 tumor bearing mice administered an immunosuppressant agent relative to unedited CD8+ 19CAR-T cells. The edited 19CAR-T cells were able to eliminate Jeko-1 tumor cells from mice administered tacrolimus, whereas unedited 19CAR-T cells were unable to eliminate Jeko-1 tumor cells from mice administered tacrolimus. Immunocompromised NOD scid gamma (NSG) mice were implanted with 5E5 Jeko-1 tumor cells and the tumor cells were allowed to engraft for 6 days. After the six days of engraftment, 1E6 unedited or edited 19CAR-T cells were infused into tumor bearing mice (N=8 mice evaluated for each experimental condition) and administered daily for 2 weeks (dotted vertical lines) either a vehicle (5% PEG400+5% Tween80) or tacrolimus (10 mg/kg in 5% PEG400+5% Tween80). Tumor burden was assessed twice per week by measuring bioluminescence using an IVIS® spectral imaging instrument. In FIGS. 13A and 13B, each data point represents a measurement taken for an individual mouse.

[0259] FIGS. 14A to 14J provide schematic diagrams, flow cytometry histograms, plots, flow cytometry contour plots, and bar graphs showing that HLA-I expression modulated susceptibility of allogeneic cells to T cell or NK cell-driven rejection. FIG. 14A provides a schematic diagram showing generation of HLA-I and HLA-II deficient allogeneic T cells using base editing to knock-out (^{KO}) b2M and CIITA, respectively. FIGS. 14B and 14C provide flow cytometry histograms and a plot showing surface HLA-I/-II expression (FIG. 14B) and frequency of on-target A>G nucleotide conversion by next-generation sequencing (FIG. 14C) in T cells base-edited with b2M- and CIITA-specific sgRNAs and ABE8.20m mRNA. Symbols represent independent donors. FIGS. 14D and 14E show results from a mixed leukocyte assay as flow cytometry (i.e., fluorescence-activated cell sorting (FACS)) contour plots (FIG. 14D) and summarized data (FIG. 14E) for frequency of allogeneic b2M^{KO}CIITA^{KO} and unmodified T cells after coculture with alloreactive T cells from an HLA disparate donor. Symbols represent allogeneic T cells from 2 independent experiments in duplicate. FIG. 14F provides a plot showing results from a cytotoxicity assay. The data indicated NK cell-driven lysis of b2M^{KO} and CIITA^{KO} T cells at different E:T ratios. Symbols represent mean of 4 independent NK cell donors in duplicate. FIG. 14G provides a plot showing percent change in CD107a⁺ NK cells after stimulation with b2M^{KO} or CIITA^{KO} T cells from stimulation with unmodified T cells. Symbols indicate NK cells from 3 independent donors in duplicate. FIGS. 14H to 14J provide a schematic diagram, flow cytometry contour plots, and a plot relating to an experiment where 5×10⁶ TCR^{KO} and TCR^{KO}b2M^{KO} allogeneic CAR-T cells were coinfused into NSG-IL-15tg mice engrafted with human NK cells (blue; n=5) or NSG-IL-15tg mice (gray; n=5) (FIG. 14H). FIGS. 14I and 14J provide a flow cytometry contour plot and a plot showing frequency (FIG. 14I) and concentration (FIG. 14H) of peripheral b2M^{KO} CAR-T cells in recipient mice. In FIG. 14J, thin and thick lines indicate individual mice and mean, respectively. Statistical significance was calculated by Wilcoxon rank-sum test (FIGS. 14F and 14G). Error bars show ±s.e.m. and sample sizes indicate biologically independent animals.

[0260] FIGS. 15A to 15F provide a schematic diagram, a bubble plot, scatter plots, plots and bar graphs showing complete retention of HLA-I alleles was necessary to broadly inhibit NK cell reactivity to allogeneic cells. FIG. 15A provides a schematic diagram of allogeneic HLA-I deficient (b2M^{KO}) T cells expressing an HLA-I single chain (HLA^{SC}) molecule that inhibits NK cells by engaging cognate HLA-specific inhibitory receptor. FIG. 15B provides a bubble plot showing frequency of CD56⁺ NK cells expressing the indicated HLA-specific inhibitory receptor from 14 independent donors. FIGS. 15C to 15E provide a flow cytometry scatter plot, plots, and a bar graphs presenting data relating to an experiment where NK cells were stimulated with allogeneic HLA-I⁺ (unmodified) T cells, b2M^{KO} T cells, or b2M^{KO} T cells engineered to express one HLA^{SC}, including HLA-Bw4^{SC} (HLA-B*57), HLA-C1^{SC} (HLA-C*01:02 or *07:02), HLA-C2^{SC} (HLA-C*04:01, *05:01, *06:02 or *18:01), or HLA-E^{SC} (HLA-E*01:03). The contour plots (FIG. 15C) and summary data (FIG. 15D) indicate frequency of CD107a⁺ KIRx⁺ or NKG2A⁺ NK cells after stimulation with unmodified T cells, b2M^{KO} T cells, or b2M^{KO} T cells expressing the cognate HLA^{SC} inhibitory ligand for the corresponding NK cell subset. FIG. 15E provides a bar graph showing frequency of total CD107a⁺ NK cells after stimulation with the indicated target T cell population. FIG. 15F provides bar graphs showing results from a cytotoxicity assay. The bar graph of FIG. 15F shows frequency of NK cell-driven specific lysis after 48 hour stimulation at different E:T ratios with unmodified T cells, b2M^{KO} T cells, or b2M^{KO} T cells engineered to express the indicated HLA^{SC}. In FIGS. 15D to 15F, symbols represent aggregated data from 3 independent NK cell donors in duplicate. Bars indicate mean and error bars show ±s.e.m. Statistical significance was calculated by Wilcoxon matched-pairs signed rank test (FIG. 15D) and Kruskall-Wallace test with Dunn's test for multiple comparisons (FIGS. 15E and 15F).

[0261] FIGS. 16A to 16J provide a schematic diagram, charts, flow cytometry contour plots, bar graphs, and plots showing immunosuppressant treatment mitigated in vivo T cell-driven rejection of allogeneic HLA-I⁺ CAR-T cells. FIG. 16A provides a schematic diagram and charts showing how five independent cohorts (#1-5) of human immune system (HIS) mice were allocated into groups that received vehicle (VEH; n=25), rapamycin (RPM; n=14), or tacrolimus (TAC; n=13) daily for 2 weeks. At 1-day post-treatment, 5×10⁶ allogeneic CD4-based CAR-T cells base-edited for TCR^{KO} (HLA⁺) or TCR^{KO}b2M^{KO}CIITA^{KO} (HLA-deficient) were mixed and coinfused into recipient HLA disparate mice. T cell infusion product for Cohorts #3 an #4 included an equal amount of syngeneic HIS-mouse derived CAR-T cells. FIG. 16B provides flow cytometry contour plots showing longitudinal frequency of peripheral HLA⁺ and HLA-deficient CAR-T cells in mice treated with VEH, RPM or TAC. FIG. 16C provides a bar graph showing aggregate peripheral allogeneic HLA⁺ CAR-T cell persistence relative to HLA-deficient CAR-T cells from within individual mice during drug treatment interval. FIG. 16D provides bar graphs showing peripheral allogeneic HLA⁺ CAR-T cell persistence relative syngeneic CAR-T cells from within individual mice in Cohorts 3 and 4 during drug treatment interval. FIGS. 16E and 16F provide plots showing a correlation between percentage change in allogeneic HLA⁺ CAR-T cells from 1 to 7 days post-infusion and contemporaneous plasma concentration of RPM in Cohorts 1-4 (FIG. 16E) and TAC in Cohorts 3-4 (FIG. 16F). FIGS. 16G and 16H provide contour plots and a plot showing frequency (FIG. 16G) and summary data (FIG. 16H) for splenic allogeneic HLA⁺ and HLA-deficient CAR-T cells from individual mice treated with VEH (n=4), RPM (n=6) and TAC (n=6) in Cohorts 3 and 4. FIGS. 16I and 16J provide plots showing cumulative persistence of peripheral allogeneic HLA⁺ CAR-T cells during drug treatment interval (1 to 15 days post-infusion) (FIG. 16I) and post-drug treatment interruption (22 to 42 days post-infusion) (FIG. 16J). For all data, symbols and sample sizes indicate biologically independent animals. Bars and lines represent mean and error bars show ±s.e.m. Statistical significance was calculated by Kruskall-Wallace test with Dunn's test for multiple comparisons (FIGS. 16C and 16D), Spearman correlation (FIGS. 16E and 16F), and Wilcoxon matched-pairs signed rank test (FIGS. 16H to 16J). AUC, area under the curve. r, coefficient of correlation.

[0262] FIGS. 17A to 17I provide plots, flow cytometry contour plots, and bar graphs showing disruption of FKBP1A in T cells conferred in vitro functional resistance to immunosuppression by rapamycin and tacrolimus. FIG. 17A provides a plot showing frequency of maximum on-target A>G nucleotide conversion by NGS in T cells base-edited with TSBT×1538 sgRNA and ABE8.20m mRNA (FKBP1A^{KO}). Symbols indicate independent donors. FIGS. 17B and 17C provide flow cytometry contour plots (FIG. 17B) and a plot of summary data (FIG. 17D) showing frequency of phosphorylated S6 protein in unmodified and FKBP1A^{KO} T cells after treatment with rapamycin (RPM) or vehicle (VEH; DMSO) control. FIGS. 17D and 17E provide flow cytometry contour plots (FIG. 17D) and a plot of summary data (FIG. 17F) showing frequency of GFP expression in unmodified or FKBP1A^{KO} T cells that expressed an NFAT-GFP reporter after treatment with tacrolimus (TAC) or VEH. FIG. 17F provides a bar graph showing percentage change in total CD19-specific CAR-T cells (19CAR) counts 1-week post-treatment with RPM or TAC relative to VEH. Symbols represent 3 independent donors in duplicate. FIGS. 17G and 17H provide flow cytometry contour plots and a bar graph showing data from an experiment where intracellular cytokine expression was measured in unmodified and FKBP1A^{KO} 19CAR-T cells after stimulation with JeKo-1 tumor cells in the presence of RPM, TAC or VEH. The flow cytometry contour plots of FIG. 17G show frequency of 19CAR-T cells expressing IFNg and TNFa, and the summary data plot of FIG. 17H shows percentage change in cytokine expression in RPM- and TAC-treated conditions relative to VEH. FIG. 17I provides plots showing results from an IncuCyte® Live-Cell Analysis System cytotoxicity assay. Tumor burden was quantified as green calibrated units (GCUs) derived from the fluorescence intensity of GFP⁺ JeKo-1 tumors that were cultured in triplicate with either untransduced (UTD) T cells, unmodified 19CAR-T cells, or FKBP1A^{KO} 19CAR-T cells at a 0.25:1 ratio. The solid lines represents mean GCU from images taken every 4 hours, dotted lines show ±s.e.m., and vertical lines indicates redosing with VEH, RPM or TAC. In FIGS. 17C, E, and H, Symbols represent 2 independent donors in duplicate. For all data, lines and bars represent mean and error bars show ±s.e.m.

[0263] FIGS. 18A to 18G provide a schematic diagram, a chart, images, plots, and bar graphs showing FKBP1A^{KO} 19CAR-T cells retained in vivo anti-tumor function in the presence of Tacrolimus and Rapamycin. FIG. 18A provides a schematic diagram and chart of drug-treatment of a tumor-bearing mouse model relating to FIGS. 18B to 18E. 5×10⁵ JeKo-1.Luc cells were transplanted into recipient NSG mice (female; aged 6-8 weeks; n=72), then 7 days after mice initiated VEH (n=24), RPM (n=24) or TAC (n=24) treatment daily for 2 weeks. One day later, mice from each drug-treatment group were infused with either 1×10⁶ untransduced (UTD) T cells (n=8 per group), unmodified CD19-specific CAR-T cells (19CAR) (n=8 per group), or FKBP1A^{KO} 19CAR-T cells (n=8 per group). FIG. 18B provides representative longitudinal bioluminescent flux imaging of JeKo-1. Luc bearing NSG mice treated with TAC and UTD, 19CAR, or FKBP1A^{KO} 19CAR-T cells. FIG. 18C provides plots showing longitudinal tumor burden (flux p/s) of T cell-treated mice that received VEH or TAC. FIG. 18D provides a bar graph showing cumulative tumor burden of T cell-treated mice during drug-treatment interval that received VEH or TAC. FIG. 18E provides a plot showing longitudinal tumor burden of T cell-treated mice that received VEH or RPM. FIGS. 18F and 18G present data relating to an experiment where female NSG mice were implanted with 5×10⁵ JeKo-1.FKBP1A^{KO}.Luc cells and 6 days later initiated VEH (n=30) or RPM (n=30) treatment daily for 2 weeks. One day later, mice from each drug-treatment arm were infused with either 1×10⁶ UTD T cells (n=10 per group), unmodified 19CAR-T cells (n=10 per group), or FKBP1A^{KO} 19CAR-T cells (n=10 per group). FIG. 18F provides plots showing longitudinal tumor burden of T cell-treated mice that received VEH or RPM. FIG. 18G provides a bar graph showing cumulative tumor burden of T cell-treated mice during drug-treatment interval that received VEH or RPM. For all data, symbols and bars reflect means and error bars show ±s.e.m., except FIGS. 18D and 18G where symbols represent individual mice. Statistical significance was calculated by Kruskall-Wallace test with Dunn's test for multiple comparisons (FIGS. 18D and 18G). AUC, area under the curve.

[0264] FIGS. 19A to 19J provide a schematic diagram, a chart, bar graphs, and flow cytometry contour plots showing FKBP1A^{KO} 19CAR-T cells with concomitant tacrolimus treatment induced B cell aplasia in immunocompetent mice. FIG. 19A provides a schematic diagram and a chart showing how four independent cohorts (#6-9) of huNCG human immune system (HIS) mice were evenly distributed into 4 groups that received VEH and UTD T cells (Group 1; n=16), VEH and HLA⁺ 19CAR-T cells (Group 2; n=16), TAC and HLA⁺ FKBP1A^{KO} 19CAR-T cells (Group 3; n=15), or VEH and HLA-deficient 19CAR-T cells (Group 4; n=16). FIGS. 19B and 19C provide a bar graph of cell concentration (FIG. 19B) and flow cytometry contour plots (FIG. 19C) for peripheral CD19⁺ B cells 6 days post-T cell infusion from mice in Groups 1-4. FIGS. 19D and 19E provide bar graphs showing total CD19⁺ B cells from individual mouse splenic (FIG. 19D) and bone marrow (FIG. 19E) tissue 10 days post-T cell infusion in Groups 1-4. FIG. 19F provides a bar graph showing geometric median fluorescent intensity (MFI) of CD19 expression on residual peripheral CD22⁺ B cells 6 days post-T cell infusion from mice in Groups 1-4. FIG. 19G provides a bar graph showing concentration of peripheral CD22⁺CD19^{dim} B cells 6 days post-T cell infusion from mice in Groups 1-4. FIG. 19H provides flow cytometry contour plots showing frequency of splenic 19CAR-T cells from mice in Groups 2-4 10 days post-T cell infusion. FIGS. 19I and 19J provide bar graphs showing concentration (FIG. 19I) and total splenic (FIG. 19J) 19CAR-T cells from mice in Groups 2-4 10 days post-T cell infusion. For all data, bars reflect mean, error bars show ±s.e.m, and symbols indicate biologically independent animals. Statistical significance was calculated by Wilcoxon rank sum test (FIGS. 19B, 19D, and 19E) and Kruskall-Wallace test with Dunn's test for multiple comparisons (FIGS. 19F, 19G, 19I, and 19J).

[0265] FIGS. 20A to 20E provide plots, a schematic diagram, and a flow cytometry scatter plot showing human immune system (HIS) mice under-reconstituted human NK cells and necessitated IL-15 treatment to eliminate HLA-deficient T cells. FIG. 20A provides a plot showing frequency of human CD56⁺ NK cells of CD45⁺ cells in PBMCs from human donors (n=10), BLT-NSG mice (Cohort A, n=18; Cohort B, n=15; Cohort C, n=18) and huCD34⁺ NCG mice (Cohort D, n=17; Cohort E, n=12; Cohort F, n=24; Cohort G, n=12). FIGS. 20B to 20E relate to an experiment where HIS mice were treated every 2-3 days with recombinant human IL-15 (2.5 mg) or PBS for 6 total injections. Mice were then coinfused 1:1 ratio with allogeneic CD4-based CAR-T cells that were base-edited for TCRKO (HLA+) or TCRKOb2MKOCIITAKO (HLA−). FIG. 20B provides a schematic diagram of in vivo study design. FIG. 20C provides flow cytometry scatter plots showing frequency of peripheral allogeneic HLA⁺ and HLA− CAR-T cells 4 days post-infusion in PBS- and IL-15-treated mice. FIG. 20D provides a plot showing concentration of peripheral allogeneic HLA+ and HLA− CAR-T cells in PBS-treated mice 4 days post-infusion. FIG. 20E provides a plot showing concentration of peripheral allogeneic HLA⁺ and HLA− CAR-T cells in IL-15-treated mice at 1 and 7 days post-infusion. For all data, symbols indicate biologically independent samples. Statistical significance was calculated by Wilcoxon matched-pairs signed rank test (FIG. 20E).

[0266] FIGS. 21A to 21C provide flow cytometry scatter plots and plots showing Rapamycin and Tacrolimus inhibited in vitro priming of alloreactive T cells. Human CD3-depleted PBMCs served as allogeneic target cells to prime CellTrace Violet labeled CD3⁺ T cells from an HLA disparate donor. CD3⁺ T cells were cultured alone (unstimulated) or in the presence of allogeneic CD3⁻ PBMCs with DMSO, or rapamycin (RPM) or tacrolimus (TAC) at different concentrations. FIG. 21A provides flow cytometry scatter plots showing frequency of dividing alloreactive CD8⁺ and CD4⁺ T cells 7 days post-coculture. FIGS. 21B and 21C provide plots showing frequency of dividing alloreactive CD8⁺ and CD4⁺ T cells at 5 (FIG. 21B) and 7 (FIG. 21C) days post-coculture. Symbols represent replicates, bars indicate mean and error bars show ±s.e.m.

[0267] FIGS. 22A to 22C provide a schematic diagram and flow cytometry scatter plots showing CD4-based CAR-T cell generation and ex vivo identification by flow cytometry. FIG. 22A provides a schematic diagram of lentiviral constructs used to generate CD4-based CAR-T cells. CD4-based CAR (4CAR) consists of the CD4 extracellular domain (ECD) fused to the CD8a hinge (H) and transmembrane (TM) regions along with the intracellular 4-1BB and CD3z activating domains. 4CAR was separated by an intervening T2A self-cleaving peptide to a molecular tag comprising GFP or truncated EGFR, NGFR or CD19. FIG. 22B provides flow cytometry scatter plots showing frequency of transduced T cells expressing molecular tag incorporated into the 4CAR lentiviral construct. FIG. 22C provides a schematic diagram showing a representative flow cytometry gating strategy to identify HLA+ and HLA-deficient 4CAR-T cells from whole blood.

[0268] FIGS. 23A to 23D provide plots showing FKBP1AKO 19CAR-T cells (effectors) exhibited in vitro anti-tumor cytotoxic activity in the presence of rapamycin and tacrolimus. Anti-tumor cytotoxicity activity was evaluated using an IncuCyte® Live-Cell Analysis System cytotoxicity assay. Tumor burden was quantified as Green Calibrated Units (GCU) derived from the fluorescence intensity of GFP⁺ JeKo-1 tumors (targets) cultured in triplicate with effector T cells either untransduced (UTD) T cells, unmodified 19CAR-T cells, or FKBP1AKO 19CAR-T cells. FIGS. 23A and 23B provide plots showing longitudinal tumor burden at 1:1 (FIG. 23A) and 0.125:1 (FIG. 23B) effector-to-target (E/T) ratios treated with vehicle (VEH; DMSO), rapamycin (RPM) or tacrolimus (TAC). FIGS. 23C and 23D provide plots showing longitudinal tumor burden at 1:1 (FIG. 23C) and 0.125:1 (FIG. 23D) E/T ratios treated with VEH or combination RPM and TAC. Data in FIGS. 23A and 23B and FIGS. 23C and 23D were generated using independent T cell donors. Bold lines indicate mean GCU from images taken every 4 hours, dotted lines show ±s.e.m., and vertical lines indicate redosing with VEH, RPM and/or TAC.

[0269] FIGS. 24A and 24B provide flow cytometry scatter plots and plots showing FKBP1AKO 19CAR-T cells (effectors) exhibited in vitro anti-tumor cytotoxic activity in the presence of immunosuppressants using a VITAL killing assay (see, e.g., Hermans, et al., J. Immunol Methods, 285:25-40 (2003), the disclosure of which is incorporated by reference in its entirety for all purposes). FIG. 24A provides flow cytometry scatter plots showing frequency of residual on-target Nalm6.CD19WT.GFP⁺ tumor cells and off-target Nalm6.CD19KO.iRFP670⁺ tumor cells (targets) at 0:1 and 0.6:1 effector-to-target (E/T) ratio with untransduced (UTD) T cells, unmodified 19CAR-T cells, or FKBP1AKO 19CAR-T cells at 48 hours post-culture. Cultures were treated with vehicle (VEH; DMSO) control, rapamycin (RPM) or tacrolimus (TAC) at the start of the assay. FIG. 24B provides plots showing frequency of specific lysis at the indicated E/T ratios in VEH-, RPM- and TAC-treated conditions 48 hours post-culture. Symbols represent mean from conditions set-up in duplicate.

[0270] FIG. 25 provides flow cytometry contour plots showing FKBP1AKO 19CAR-T cells were sensitive to dexamethasone and prednisone immunosuppression. Unmodified and FKBP1AKO 19CAR-T cells were stimulated with JeKo-1 tumor cells in the presence of vehicle (VEH; DMSO) control, tacrolimus (TAC), dexamethasone (DEX), prednisone (PRD) and then analyzed for intracellular production of cytokines. The flow cytometry contour plots show frequency of IFNg and TNFa producing 19CAR-T cells

[0271] FIGS. 26A to 26E provide histograms and plots showing malignant B cell lines were sensitive to Rapamycin treatment in vitro. FIG. 26A provides histograms showing geometric median fluorescent intensity (MFI) of phosphorylated mTOR (pS2448), S6 (pS235/S2346) and 4EBP1 (pT36/T45) in JeKo-1, Raji and Nalm6 cell lines, as well as primary human monocytes and bulk lymphocytes. FIGS. 26B to 26D relate to an experiment where JeKo-1, Raji and Nalm6 cells were treated with DMSO or Rapamycin (RPM) and then analyzed for phosphorylation level of mTOR (FIG. 26B), S6 (FIG. 26C) and 4EBP1 (FIG. 26D). FIG. 26E provides plots showing JeKo-1, Raji and Nalm6 cell growth kinetics after treatment with DMSO or RPM at different concentrations. Symbols indicate mean and error bars show ±s.e.m.

[0272] FIGS. 27A and 27B provide schematic diagrams describing how the different regions of the prime editing guide RNA (pegRNA) sequences of Table 10 correspond to regions of the FKBP1A gene. FIG. 27A provides a schematic diagram showing how components of the pegRNAs containing Spacer 1 of Example 11 correspond to different regions of the FKBP1A gene. FIG. 27B provides a schematic diagram showing how components of the pegRNAs containing Spacer 2 of Example 11 correspond to different regions of the FKBP1A gene. In the pegRNA molecules, the spacer sequence remains constant (i.e., is Spacer 1 or Spacer 2), but the length of the reverse transcriptase template (RTT) and/or primer binding sequence (PBS) varies between the different pegRNA molecules of Table 10. In a cell, the spacers of the pegRNA molecules bind the forward strand (upper sequence) depicted in each of FIGS. 27A and 27B), and the “extension” containing the RTT and PBS binds the reverse strand (lower sequence). The protospacer adjacent motif was CGG or AGG and the reverse strand was nicked on the reverse strand between the nucleotides indicated by the two pipes (i.e., |). In FIGS. 27A and 27B, the star (*) indicates the location of the nucleobase targeted for editing. The nucleotide sequence depicted in FIG. 27A corresponds to SEQ ID NO: 775 and the nucleotide sequence depicted in FIG. 27B corresponds to SEQ ID NO: 775.

[0273] FIG. 28 provides a schematic diagram describing how the reverse transcriptase template (RTT) region of the prime editing guide RNA (pegRNA) sequences of Table 10 corresponds to regions of the FKBP1A gene. In FIG. 28, the term “Edit” indicates the nucleobase targeted for editing, as indicated by a “*,” the term “Possible RTT Span” indicates the nucleotides that may correspond to the RTT (see also FIGS. 27A and 27B), “Genome” indicates FKBP1A gene sequence, “Codons” indicates the position number of the corresponding codons and the encoded amino acids, “Amino acid” indicates the amino acid sequence encoded by the codons indicated in the gene sequence, and “Transcription Direction” indicates the direction of transcription by the reverse transcriptase during primer editing. The sequences depicted in FIG. 28 in order of occurrence, from top-to-bottom, correspond to SEQ ID NOs: 776-777.

[0274] FIG. 29 provides combined bar graphs (left bar graphs relate to cells expressing human leukocyte antigen A (HLA-A), HLA-B, and HLA-C (HLA-ABC+), and right bar graphs relate to cells base edited to knock out expression of HLA-A, HLA-B, and HLA-C (HLA-ABC−)) demonstrating that combined treatment with rapamycin and tacrolimus protected HLA-mismatched 4CAR-T cells from allorejection by recipient humanized mice. The mice were administered 5 million HLA-positive 4CAR-T cells that were base edited to knock-out (KO) T cell receptor (TCR) expression and 5 million HLA-negative 4CAR-T cells that were base-edited to KO TCR expression, beta-2-microglobulin (B2M) expression and class-II transcriptional activator (CIITA) expression. The bar graphs of FIG. 29 depict the percent of total 4CAR-T cells in peripheral blood that were HLA-positive (HLA-ABC+) or HLA-negative (HLA-ABC-) at 1, 7 and 14 days post-infusion from mice treated with vehicle (VEH) or the combination of rapamycin and tacrolimus (RPM+TAC). Unfilled circles represent individual mice, bars indicate mean, and error bars indicate +/−SEM.

### DETAILED DESCRIPTION

[0275] The disclosure features modified immune effector cells (e.g., T or NK cells) having increased resistance to inhibition by immunosuppressant agents relative to unmodified immune effector cells, compositions containing the same, and methods for use thereof.

[0276] The disclosure is based, at least in part, on the discovery that immune cells, such as T cells (e.g., CAR-T cells) or NK cells, can be modified through the use of base editor systems (e.g., those systems provided herein) to reduce or eliminate expression and/or activity of a polypeptide selected from one or more of FKBP1A, NR3C1, or PPIA to reduce susceptibility of the modified cells to an immunosuppressive agent. For example, it was found that cells modified to reduce or eliminate expression of FKBP1A showed reduced susceptibility to the immunosuppressants rapamycin and tacrolimus (e.g., increased proliferation, improved cytokine production, and improved cytotoxicity in the presence of the immunosuppressant agents).

[0277] Accordingly, the disclosure provides modified immune cells (e.g., CAR-T cells) with reduced or undetectable expression of FKBP1A, NR3C1, and/or PPIA and reduced susceptibility to immunosuppression by an immunosuppressive agent. The disclosure further provides methods for treatment of a neoplasia, where the methods involve administering to a subject a chimeric antigen receptor (CAR) T cell with reduced or undetectable expression of FKBP1A, NR3C1, and/or PPIA, and administering to the subject an immunosuppressant agent. Co-administration of the immunosuppressant agent (e.g., as part of an immunosuppression therapy) can advantageously inhibit rejection of the edited CAR T cells by a patient's immune system while having a reduced or negligible inhibitory effect on the edited CAR T cells themselves. Administration of the immunosuppressant agent dampens the function of the host immune system thereby inhibiting the generation of an effective alloreactive immune response.

### Immunosuppressant Agents

[0278] Immunosuppressant agents are therapeutic agents used to reduce an immune response in a subject. Such agents include, but are not limited to, mTOR inhibitors (e.g., a rapalog, such as rapamycin or Everolimus), Calcineurin Inhibitors (e.g., cyclosporine A or tacrolimus), and Glucocorticoids (e.g., Dexamethasone or Prednisolone). Immunosuppressant agents are often used to inhibit rejection of transplanted cells (e.g., allogeneic cells) obtained from a donor by the host's immune system. Immunosuppressant agents can reduce the proliferation of immune effector cells, reduce the cytotoxicity of immune effector cells, and/or reduce cytokine release. This immunosuppressive effect is mediated, for example, by binding of the immunosuppressant agent to a protein (e.g., FKBP1A, NR3C1, PPIA). For example, an NR3C1 polypeptide is capable of binding a steroid drug. Tacrolimus is capable of binding FKBP1A, and PPIA is capable of binding a glucocorticoid. When FKBP1A, PPIA, or NR3C1 expression is reduced or eliminated in an immune effector cell (T cell, NK cell) it renders the cell resistant to the effects of the immunosuppressant agent. In embodiments, an edited immune effector cell shows a 10%, 20%, 30%, 40%, 50%, 60%, 70%, 80%, 90%, 95%, 99% or greater resistance to the immunosuppressant agent (e.g., resistance to reductions in proliferation, cytotoxicity, and/or cytokine release caused by the agent as compared to a control cell). Resistance may be measured by assaying the immune effector cell's cytotoxicity, cytokine release or proliferation in the presence of the agent relative to the effects of the agent on an unedited immune effector cell.

### Car-T Cell Therapies

[0279] The present disclosure provides immune cells (e.g., T- or NK-cells) modified using nucleobase editors and/or nucleases described herein. The modified immune cells may express chimeric antigen receptors (CARs) (e.g., CAR-T cells). Modification of immune cells to express a chimeric antigen receptor can enhance an immune cell's immunoreactive activity, where the chimeric antigen receptor has an affinity for an epitope on an antigen, and where the antigen is associated with an altered fitness of an organism. For example, the chimeric antigen receptor can have an affinity for an epitope on a protein expressed in a diseased cell. Because the CAR-T cells can act independently of major histocompatibility complex (MHC), activated CAR-T cells can kill the diseased cell expressing the antigen. The direct action of the CAR-T cell evades defensive mechanisms that have evolved in response to MHC presentation of antigens to immune cells.

[0280] The modified immune cells and methods provided herein address known limitations of CAR-T therapy and represent a promising development towards the next generation of precision cell-based therapies.

[0281] In embodiments, one or more genes are modified in an immune effector cell so that the cell has a reduced level of, reduced activity of, lacks, or has virtually undetectable levels of FKBP1A, NR3C1, and/or PPIA. In embodiments, the immune effector cells are genetically modified to knock-out expression of FKBP1A, NR3C1, and/or PPIA. In some cases, the immune effector cells are genetically modified to reduce the activity of a FKBP1A, NR3C1, and/or PPIA polypeptide (e.g., through the introduction of a missense mutation to a codon encoding an amino acid in a ligand or DNA binding domain). In embodiments, one or more genes are modified in an immune effector cell so that the cell has a reduced level of, lacks, or has virtually undetectable levels of 1, 2, or all of the following polypeptides: FKBP1A, NR3C1, and/or PPIA. In embodiments, one or more genes are modified in an immune effector cell so that the cell has a reduced level of, lacks, or have virtually undetectable levels 1, 2, 3, 4, 5, or all of beta-2-microglobulin (B2M), cluster of differentiation 3-epsilon (CD3e), cluster of differentiation 3-gamma (CD3g), class II major histocompatibility complex transactivator (CIITA), programmed cell death 1 (PD1), and/or T cell receptor constant region (TRAC). In embodiments, one or more genes are modified in an immune effector cell so that the cell has a reduced level of, lacks, or have virtually undetectable levels of FKBP1A, NR3C1, and/or PPIA, and of beta-2-microglobulin (B2M), cluster of differentiation 3-epsilon (CD3e), cluster of differentiation 3-gamma (CD3g), class II major histocompatibility complex transactivator (CIITA), programmed cell death 1 (PD1), and/or T cell receptor constant region (TRAC).

[0282] In embodiments, the modified immune effector cells have increased resistance to immunosuppression by one or more of glucocorticoids (e.g., dexamethasone or prednisolone), calcineurin inhibitors (e.g., cyclosporine A or tacrolimus), and mTOR inhibitors (e.g., a rapalog, such as rapamycin or everolimus).

[0283] In embodiments, the modified immune effector cells of the disclosure activated by an antigen produce cytokines in the presence of an immunosuppressive agent at a level that is about or at least about 1.5-fold, 2-fold, 3-fold, 4-fold, 5-fold, 10-fold, 15-fold, 20-fold, 25-fold, 30-fold, 35-fold, 40-fold, 45-fold, or 50-fold greater than a level produced by unmodified immune effector cells under similar conditions. Non-limiting examples of cytokines include granzyme B, tumor necrosis factor alpha (TNFa), and interferon gamma (IFNg). In some cases, the modified immune effector cells of the disclosure activated by an antigen show levels of proliferation in the presence of an immunosuppressive agent that is about or at least about 1.5-fold, 2-fold, 3-fold, 4-fold, 5-fold, 10-fold, 15-fold, 20-fold, 25-fold, 30-fold, 35-fold, 40-fold, 45-fold, or 50-fold greater than levels of proliferation for unmodified immune effector cells under similar conditions.

[0284] In embodiments, one or more genes are modified in an immune effector cell so that the cell has a reduced level of, lacks, or have virtually undetectable levels of FKBP1A, NR3C1, and/or PPIA, and/or one or more of the following polypeptides relative to an unmodified immune cell: B cell leukemia/lymphoma 11b (Bcl11b); B cell leukemia/lymphoma 2 related protein A1d (Bcl2a1d); B cell leukemia/lymphoma 6 (Bcl6); butyrophilin-like 6 (Btnl6); CD151 antigen (Cd151); chemokine (C—C motif) receptor 7 (Ccr7); discs large MAGUK scaffold protein 5 (Dlg5); erythropoietin (Epo); G protein-coupled receptor 18 (Gpr18); interferon alpha 15 (Ifna15); interleukin 6 signal transducer (Il6st); interleukin 7 receptor (Il7r); Janus kinase 3 (Jak3); membrane associated ring-CH-type finger 7 (Marchf7); NCK associated protein 1 like (Nckap1l); phospholipase A2, group IIF (Pla2g2f); runt related transcription factor 3 (Runx3); Signal-regulatory protein beta 1B (Sirpb1b); transforming growth factor, beta 1 (Tgfb1); tumor necrosis factor (ligand) superfamily, member 14 (Tnfsf14); tumor necrosis factor (ligand) superfamily, member 18 (Tnfsf18); tumor necrosis factor (ligand) superfamily, member 8 (Tnfsf8); zinc finger CCCH type containing 8 (Zc3 h8); (Rac family small GTPase 2); (Slc4a1); 5-azacytidine induced gene 2 (Azi2); a disintegrin and metalloprotease domain 17 (Adam 17); a disintegrin and metalloprotease domain 8 (Adam8); Acetyl-CoA Acetyltransferase 1 (ACAT1); ACLY; adapter related protein complex 3 beta 1 subunit (Ap3b1); adapter related protein complex 3 delta 1 subunit (Ap3d1); adenosine A2a receptor (Adora2a); adenosine deaminase (Ada); adenosine kinase (Adk); adenosine regulating molecule 1 (Adrm1); advanced glycosylation end product-specific receptor (Ager) allograft inflammatory factor 1 (Aif1); AKT1; AKT2; amyloid beta (A4) precursor protein-binding family B member 1 interacting protein (Apbb1ip); ankyrin repeat and LEM domain (Ankle1); annecin A1 (Anxa1); arginase liver (Arg 1); arginase type II (Arg 2); AtPase Cu++ transporting, alpha polypeptide (Atp7a); autoimmune regulator (Aire); autophagy related 5 (Atg5); AXL; B and T Lymphocyte Associated (BTLA); B and T lymphocyte associated (Btla); B cell leukemia/lymphoma 10 (Bcl10); B cell leukemia/lymphoma 11a (Bcl11a); B cell leukemia/lymphoma 2 (Bcl2); B cell leukemia/lymphoma 3 (Bcl3); basic leucine zipper transcription factor, ATF-like (Batf); BCL2-associated X protein (Bax); BCL2L11; beta 2 microglobulin (B2m); BL2-associated agonist of cell death (Bad); BLIMP1; Bloom syndrome, RecQ like helicase (Blm); Bmi1 polycomb ring finger oncogene (Bmi1); Bone morphogenic protein 4 (Bmp4); Braf transforming gene (Braf); butyrophilin, subfamily 2, member A1 (Btn2a1); butyrophilin, subfamily 2, member A2 (Btn2a2); butyrophilin-like 1 (Btnl1); butyrophilin-like 2 (Btnl2); c-abl oncogene 1 (Abl1); c-abl oncogene 2 (Abl2); cadherin-like 26 (Cdh26); calcium channel, voltage dependent, beta 4 subunit (Cacnb4); CAMK2D; capping protein regulator and myosin 1 linker 2 (Carmil2); carcinoembryonic antigen-related cell adhesion molecule (Ceacam1); Casitas B-lineage lymphoma b (Cblb); CASP8; Caspase 3 (Casp3); caspase recruitment domain family member 11 (Card11); catenin (cadherin associated protein), beta 1 (Ctnnb1); caveolin 1 (Cav1); CBL-B; CCAAT/enhancer binding protein (C/EBP), beta (Cebpb); CCR10; CCR4; CCR5; CCR6; CCR9; CD103; CD11a; CD122; CD123; CD127; CD130; CD132; CD160 antigen (Cd160); CD161; CD19; CD1d1 antigen (Cd1d1); CD1d2 antigen (CD1d2); CD2 antigen (CD2); CD209e antigen (Cd209e); CD23; CD244 molecule A (Cd244a); CD24a antigen (Cd24a); CD27 antigen (CD27); CD274 antigen (Cd274); CD276 antigen (Cd276); CD28 antigen (Cd28); CD3 delta; CD3 epsilon; CD3 gamma; CD30; CD300A molecule (Cd300a); CD33; CD38; CD4 antigen (Cd4); CD40 ligand (Cd40lg); CD44 antigen (Cd44); CD46 antigen, complement regulatory protein (Cd46); CD47 antigen (Rh-related antigen, integrin-associated signal transducer) (Cd47); CD48 antigen (Cd48); CD5 antigen (Cd5); CD52; CD58; CD59b antigen (Cd59b); CD6 antigen (Cd6); CD69; CD7; CD70; CD74 antigen (Cd74); CD8; CD8 antigen (Cd8); CD80 antigen (Cd80); CD81 antigen (Cd81); CD82; CD83 antigen (Cd83); CD86; CD86 antigen (Cd86); CD8A; CD96; CD99; CDK4; CDK8; CDKN1B; chemokine (C motif) ligand 1 (Xcl1); chemokine (C—C motif) ligand 19 (Ccl19); chemokine (C—C motif) ligand 2 (Ccl2); chemokine (C—C motif) ligand 20 (Ccl20); chemokine (C—C motif) ligand 5 (Ccl5); chemokine (C—C motif) receptor 2 (Ccr2); chemokine (C—C motif) receptor 6 (Ccr6); chemokine (C—C motif) receptor 9 (Ccr9); chemokine (C—X—C motif) ligand 12 (Cxcl12); chemokine (C—X—C motif) receptor (Cxcr4); Chitinase 3 Like 1 (Chi31l); cholinergic receptor, nicotinic, alpha polypeptide 7 (Chrna7); chromodomain helicase DNA binding protein 7 (Chd7); CLA; Class II Major Histocompatibility Complex Transactivator (CIITA); cleft lip and palate associated transmembrane protein 1 (Clptm1); Cluster of Differentiation 123 (CD123); Cluster of Differentiation 3 (CD3); Cluster of Differentiation 33 (CD33); Cluster of Differentiation 52 (CD52); Cluster of Differentiation 7 (CD7); Cluster of Differentiation 96 (CD96); coagulation factor II (thrombin) receptor-like 1 (F2rl1); coil-coil domain containing 88B (Ccdc88b); core-binding factor beta (Cbfb); coronin, actin binding protein 1A (Coro1a); coxsackie virus and adenovirus receptor (Cxadr); CS-1; CSF2CSK; c-src tyrosine kinase (Csk); C-type lectin domain family 2, member i (Clec2i); C-type lectin domain family 4, member a2 (Clec4a2); C-type lectin domain family 4, member d (Clec4d); C-type lectin domain family 4, member e (Clec4e); C-type lectin domain family 4, member f (Clec4f); C-type lectin domain family 4, member g (Clec4g); CUL3; CXCR3; cyclic GMP-AMP synthase (Cgas); cyclin D3 (Ccnd3); cyclin dependent kinase inhibitor 2A (Cdkn2a); cyclin-dependent kinase (Cdk6); CYLD lysine 63 deubiquitinase (Cyld); cysteine-rich protein 3 (Crip3); cytidine 5′-triphosphate synthase (Ctps); Cytochrome P450 Family 11 Subfamily A Member 1 (Cyp11a1); cytochrome P450, family 26, subfamily b, polypeptide (Cyp26b1); Cytokine Inducible SH2 Containing Protein (CISH); cytotoxic T lymphocyte-associated protein 2 alpha (Ctla2a); Cytotoxic T-Lymphocyte Associated Protein 4 (CTLA-4); DCK; dedicator of cytokinesis 2 (Dock2); dedicator of cytokinesis 8 (Dock8); delta like canonical Notch ligand 4 (Dll4); deltex 1, E3 ubiquitin ligase (Dtx1); deoxyhypusine synthase (Dhps); DGKA; DGKZ; DHX37; dicer 1, ribonuclease type III (Dicer1); dipeptidylpeptidase 4 (Dpp4); discs large MAGUK scaffold protein 1 (Dlg1); DnaJ heat shock protein family (Hsp40) member A3 (Dnaja3); dolichyl-di-phosphooligosaccharide-protein glycotransferase (Ddost); double homeobox B-like 1 (Duxbl1); drosha, ribonuclease type III (Drosha); dual specificity phosphatase 10 (Dusp10); dual specificity phosphatase 22 (Dusp22); dual specificity phosphatase 3 (Dusp3); E74-like factor 4 (Elf4); early growth response 1 (Egr1); early growth response 3 (Egr3); ELOB (TCEB2); ENTPD1 (CD39); eomesodermin (Eomes); Eph receptor B4 (Ephb4); Eph receptor B6 (Ephb6); ephrin B1 (Efnb1); ephrin B2 (Efnb2); ephrin B3 (Efnb3); Epstein-Barr virus induced gene 3 (Ebi3); erb-b2 receptor tyrosine kinase (Erbb2); eukaryotic translation initiation factor 2 alpha kinase 4 (Eif2ak4); FADD; family with sequence similarity 49, member B (Fam49b); Fanconi anemia, complementation group A (Fanca); Fanconi anemia, complementation group D2 (Fancd2); Fas (TNF receptor superfamily member 6) (Fas); Fas (TNFRSF6)-associated via death domain (Fadd); Fas Cell Surface Death Receptor (FAS); Fc receptor, IgE, high affinity I, gamma polypeptide (Fcer1g); fibrinogen-like protein 1 (Fgl1); fibrinogen-like protein 2 (Fgl2); FK506 binding protein 1a (Fkbp1a); FK506 binding protein 1b ((Fkbp1b); flotillin 2 (Flot2); FMS-like tyrosine kinase (Flt3); forkhead box J1 (Foxj1); forkhead box N1 (Foxn1); forkhead box P1 (Foxp1); forkhead box P3 (Foxp3); frizzled class receptor 5 (Fzd5); frizzled class receptor 7 (Fzd7); frizzled class receptor 8 (Fzd8); fucosyltransferase 7 (Fut7); Fyn proto-oncogene (Fyn); gap junction protein, alpha 1 (Gja1); GATA binding protein 3 (GATA3); GCN2 kinase (IDO pathway); gelsolin (Gsn); GLI-Kruppel family member GLI3 (Gli3); glycerol-3-phosphate acyltransferase, mitochondrial (Gpam); growth arrest and DNA-damage-inducible 45 gamma (Gadd45g); GTPase, IMAP family member 1 (Gimap1); H1TET2; H2.0-like homeobox (Hlx); haematopoietic 1 (hem1); HCLS1 binding protein 3 (Hs1bp3); heat shock 105 kDa/110 kDa protein 1 (Hsph1); heat shock protein 1 (chaperonin) (Hspd1); heat shock protein 90, alpha (cytosolic), class A member 1 (Hsp90aa1); hematopoietic SH2 domain containing (Hsh2d); hepatitis A virus cellular receptor 2 (Haver2); hes family bHLH transcription factor 1 (Hes1); histocompatibility 2, class II antigen A, alpha (H2-Aa); histocompatibility 2, class II antigen A, beta 1 (H2-Ab1); histocompatibility 2, class II, locus dMa (H2-dMa); histocompatibility 2, M region locus 3 (H3-M3); histocompatibility 2, O region alpha locus (H2-Oa); histocompatibility 2, T region locus 23 (H2-T23); HLA-DR; homeostatic iron regulator (Hfe); icos ligand (Icosl); IKAROS family zinc finger 1 (Ikzf1); IL10; IL10RA; IL2 inducible T cell kinase (Itk); IL6R; Indian hedgehog (Ihh); indoleamine 2,3-dioxygenase 1 (Ido1); inducible T cell co-stimulator (Icos); inositol 1,4,5-trisphosphate 3-kinase B (Itpkb); insulin II (Ins2); insulin-like growth factor 1 (Igf1); insulin-like growth factor 2 (Igf2); insulin-like growth factor binding protein 2 (Igfbp2); integrin alpha L (Itgal); integrin alpha M (Itgam); integrin alpha V (Itgav); integrin alpha X (Itgax); integrin beta 2 (Itgb2); integrin, alpha D (Itgad); intercellular adhesion molecule 1 (Icam1); interferon (alpha and beta) receptor 1 (Ifnar1); interferon alpha 1 (Ifna1); interferon alpha 11 (Ifna11); interferon alpha 12 (Ifna12); interferon alpha 13 (Ifna13); interferon alpha 14 (Ifna14); interferon alpha 16 (Ifna16); interferon alpha 2 (Ifna2); interferon alpha 4 (Ifna4); interferon alpha 5 (Ifna5); interferon alpha 6 (Ifna6); interferon alpha 7 (Ifna7); interferon alpha 9 (Ifna9); interferon alpha B (Ifnab); interferon beta 1 (Ifnb1); interferon gamma (IFNg); interferon kappa (Ifnk); interferon regulatory factor 1 (Irf1); interferon regulatory factor 4 (Irf4); interferon zeta (Ifnz); interleukin 1 beta (Il1b; interleukin 1 family, member 8 (Il1f8); interleukin 1 receptor-like 2 (Il1rl2); interleukin 12 receptor, beta1 (Il12rb1); interleukin 12a (Il12a); interleukin 12b (Il12b); interleukin 15 (Il15); interleukin 18 (Il18); interleukin 18 receptor 1 (Il18r1); interleukin 2 (Il2); interleukin 2 receptor, alpha chain (Il2ra); interleukin 2 receptor, gamma chain (Il2rg); interleukin 20 receptor beta (Il20rb); interleukin 21 (Il21); interleukin 23, alpha subunit p19 (Il23a); interleukin 27 (Il27); interleukin 4 (Il4); interleukin 4 receptor, alpha (Il4ra); interleukin 6 (Il6); interleukin 7 (Il7); IRF8; itchy, E3 ubiquitin protein ligase (Itch); jagged 2 (Jag2); jumonji domain containing 6 (Jmjd6); JUNB; junction adhesion molecule like 9 (Jam9); K (lysine) acetyltransferase 2A (Kat2a); KDEL (Lys-Asp-Glu-Leu) endoplasmic reticulum protein retention receptor 1 (Kdelr1); KIT proto-oncogene receptor tyrosine kinase (Kit); LAG-3; LAIR-1 (CD305); LDHA; lectin, galactose binding, soluble 1 (Lgals1); lectin, galactose binding, soluble 3 (Lgals3); lectin, galactose binding, soluble 8 (Lgals8); lectin, galactose binding, soluble 9 (Lgals9); leptin (Lep); leptin receptor (Lepr); leucine rich repeat containing 32 (Lrrc32); leukocyte immunoglobulin-like receptor, subfamily B, member 4A (Lilrb4a); LFNG O-fucosylpeptide 3-beta-N-acetylglucosaminyltransferase (Lfng); LIF; ligase IV, DNA, ATP-dependent (Lig4); LIM domain only 1 (Lmo1); limb region 1 like (Lmbrl); linker for activation of T cells (Lat); lymphocyte antigen 9 (Ly9); lymphocyte cytosolic protein 1 (Lcp1); lymphocyte protein tyrosine kinase (Lck); lymphocyte transmembrane adaptor 1 (Lax1); lymphocyte-activation gene 3 (Lag3); lymphoid enhancer binding factor 1 (Lef1); LYN; lysyl oxidase-like 3 (Lox13); MAD1 mitotic arrest deficient 1-like 1 (Mad1l1); MALTI paracaspase (Malt1); MAP4K4; MAPK14; MCJ; mechanistic target of rapamycin kinase (Mtor); MEF2D; Methylation-Controlled J Protein (MCJ); methyltransferase like 3 (Mettl3); MGAT5; MHC I like leukocyte 2 (Mill2); midkine (Mdk); mitogen-activated protein kinase 8 interacting protein 1 (Mapk8ip10); moesin (Msn); myelin protein zero-like 2 (Mpzl2); myeloblastosis oncogene (Myb); myosin, heavy polypeptide 9, non-muscle (Myh9); Nedd4 family interacting protein 1 (Ndfip1); neural precursor cell expressed, developmentally down-regulated 4 (Nedd4); NFATc1; NFATC2; NFATC4; NFKB activating protein (Nkap); nicastrin (Ncstn); NK2 homeobox 3 (Nkx2-3); NLR family, CARD domain containing 3 (Nlrc3); NLR family, pyrin domain containing 3 (Nlrp3); non-catalytic region of tyrosine kinase adaptor protein 1 (Nck1); non-catalytic region of tyrosine kinase adaptor protein 2 (Nck2); non-homologous end joining factor 1 (Nhej1); non-SMC condensin II complex, subunit H2 (Ncaph2); Notch-regulated ankyrin repeat protein (Nrarp); NT5E (CD73); nuclear factor of activated T cells, cytoplasmic, calcineurin dependent (Nfatc3); nuclear factor of kappa light polypeptide gene enhancer in B cells inhibitor, delta (Nfkbid); nuclear receptor co-repressor 1 (Ncor1); Nuclear Receptor Subfamily 4 Group A Member 1 (NR4A1); Nuclear Receptor Subfamily 4 Group A Member 2 (NR4A2); Nuclear Receptor Subfamily 4 Group A Member 3 (NR4A3); ODC1; OTU domain containing 5 (Otud5); OTULINL (FAM105A); paired box 1 (Pax1); PDCD1 (PD1; PD-1); PDIA3; pellino 1 (Peli1); peroxiredoxin 2 (Prdx2); PHD1 (EGLN2); PHD2 (EGLN1); PHD3 (EGLN3); phosphodiesterase 5A, cGMP-specific (Pde5a); phosphoinositide-3-kinase regulatory subunit (Pik3r6); phospholipase A2, group IIA (Pla2g2a); phospholipase A2, group IID (Pla2g2d); phospholipase A2, group IIE (Pla2g2e); phosphoprotein associated with glycosphingolipid microdomains 1 (Pag1); PIK3CD; PIKFYVE; POZ (BTB) and AT hook containing zinc finger 1 (Patz1); PPARa; PPARd; PR domain containing 1, with ZNF domain (Prdm1); presenilin 1 (Psen1); presenilin 2 (Psen2); PRKACA; PRKC, apoptosis, WT1, regulator (Pawr); programmed cell death 1 ligand 2 (Pdcd1lg2); prosaposin (Psap); prostaglandin E receptor 4 (subtype EP4) (Ptger4); protein kinase C, theta 2 (Prkcq); protein kinase C, zeta (Prkcz); protein kinase, cAMP dependent regulatory, type I, alpha (Prkar1a); protein kinase, DNA activated, catalytic polypeptide (Prkdc); protein phosphatase 3, catalytic subunit, beta isoform (Ppp3cb); protein tyrosine phosphatase, non-receptor type 2 (Ptpn2); protein tyrosine phosphatase, non-receptor type 22 (lymphoid) (Ptpn22); protein tyrosine phosphatase, non-receptor type 6 (Ptpn6); protein tyrosine phosphatase, receptor type, C (Ptprc); PTEN; PTPN11; purine-nucleoside phosphorylase (Pnp); purinergic receptor P2X, ligand-gated ion channel, 7 (P2rx7); PVR Related Immunoglobulin Domain Containing (PVRIG; CD112R); PYD and CARD domain containing 7 (Pycard); RAB27A, member RAS oncogene family (Rab27a); RAB29, member RAS oncogene family (Rab29); radical S-adenosyl methionine domain containing 2 (Rsad2); RAR-related orphan receptor alpha (Rora); RAR-related orphan receptor gamma (Ror); RAS guanyl releasing protein 1 (Rasgrp1); ras homolog family member A (Rhoa); ras homolog family member H (Rhoh); RAS protein activator like 3 (Rasal3); RASA2; receptor (TNFRSF)-interacting serine-threonine kinase 2 (Ripk2); recombination activating gene 1 (Rag1); recombination activating gene 2 (Rag2); Regulatory Factor X Associated Ankyrin Containing Protein (RFXANK); RHO family interacting cell polarization regulator 2 (Ripor2); ribosomal protein L22 (Rpl 22); ribosomal protein S6 (Rps6); RING CCCH (C3H) domains 1 (Rc3 h1); ring finger and CCCH-type zinc finger domains 2 (Rc3 h2); RNF2; runt related transcription factor 1 (Runx1); runt related transcription factor 2 (Runx2); SAM and SH3 domain containing 3 (Sash3); schlafen 1; Selectin P Ligand/P-Selectin Glycoprotein Ligand-1 (SELPG/PSGL1) polypeptide; selenoprotein K (Selenok); sema domain immunoglobulin domain (Ig), transmembrane domain (TM) and short cytoplasmic domain, (semaphorin) 4A (Sema4a); serine/threonine kinase 11 (Stk11); SH3 domain containing ring finger 1 (Sh3rf1); SHP1; sialophorin (Spn); SIGLEC15; signal transducer and activator of transcription 3 (Stat3); signal transducer and activator of transcription 5A (Stat5A); signal transducer and activator of transcription 5B (Stat5B); signal-regulatory protein alpha (Sirpa); Signal-regulatory protein beta 1A (Sirpb1a); Signal-regulatory protein beta 1C (Sirpb1c); SLA; SLAM family member 6 (Slamf6); SLAMF7; SMAD family member 3 (Smad3); SMAD family member 7 (Smad7); SMARCA4; solute carrier family 11 (proton-coupled divalent metal ion transporters), member 1 (Slc11a1); solute carrier family 4 (anion exchanger), member 1; solute carrier family 46, member 2 (Slc46a2); sonic hedgehog (Shh); SOS Ras/Rac guanine nucleotide exchange factor 1 (Sos1); SOS Ras/Rac guanine nucleotide exchange factor 2 (Sos2); special AT-rich sequence binding protein 1 (Satb1); spleen tyrosine kinase (Syk); Sprouty RTK Signaling Antagonist 1 (Spry1); Sprouty RTK Signaling Antagonist 2 (Spry2); squamous cell carcinoma antigen recognized by T cells (Sart1); src homology 2 domain-containing transforming protein B (Shb); Src-like-adaptor 2 (Sla2); SRY (sex determining region Y)-box 4 (Sox4); STK4; suppression inducing transmembrane adaptor 1 (Sit1); suppressor of cytokine signaling 1 (Socs1); suppressor of cytokine signaling 5 (Socs5); suppressor of cytokine signaling 6 (Socs6); surfactant associated protein D (Sftpd); SUV39; syndecan 4 (Sdc4); syntaxin 11 (Stx11); T Cell Immunoglobulin Mucin 3 (Tim-3); T cell immunoreceptor with Ig and ITIM domains (Tigit); T cell receptor alpha joining 18 (Traj18); T Cell Receptor Beta Constant 1 (TRBC1); T Cell Receptor Beta Constant 2 (TRBC2); T cell, immune regulator 1, ATPase, H+ transporting, lysosomal V0 protein A3 (Tcirg1); T cell-interacting, activating receptor on myeloid cells 1 (Tarm1); T-box 21 (Tbx21); TCR; TCR alpha; TCR beta; TCR complex gene sequence; Tet Methylcytosine Dioxygenase 2 (TET2); TGFbRII; TGFbRII (TGFBR2); three prime repair exonuclease 1 (Trex1); thymocyte selection associated (Themis); thymus cell antigen 1, theta (Thy1); TMEM222; TNF receptor-associated factor 6 (Traf6); TNFAIP3; TNFRSF10B; TNFRSF8 (CD30); TOX; TOX2; TRAC; transformation related protein 53 (Trp53); Transforming Growth Factor Beta Receptor II (TGFbRII); transforming growth factor, beta receptor II (Tgfbr2); transmembrane 131 like (Tmem1311); transmembrane protein 98 (Tmem98); triggering receptor expressed on myeloid cells-like 2 (Trem12); TSC complex subunit 1 (Tsc1); tumor necrosis factor (ligand) superfamily, member 11 (Tnfsf11); tumor necrosis factor (ligand) superfamily, member 13b (Tnfsf13b); tumor necrosis factor (ligand) superfamily, member 4 (Tnfsf4); tumor necrosis factor (ligand) superfamily, member 9 (Tnfsf9); tumor necrosis factor receptor superfamily, member 13c (Tnfrsf13c); tumor necrosis factor receptor superfamily, member 4 (Tnfrsf4); tumor necrosis factor, alpha-induced protein 8-like 2 (Tnfa1p8l2); twisted gastrulation BMP signaling modulator 1 (Twsg1); UBASH3A; vanin 1 (Vnn1); vascular cell adhesion molecule 1 (Vcam1); VHL; v-maf musculoaponeurotic fibrosarcoma oncogene family, protein B (avian) (Mafb); V-set and immunoglobulin domain containing 4 (Vsig4); V-Set Immunoregulatory Receptor (VISTA); WD repeat and FYVE domain containing 4 (Wdfy4); wingless-type MMTV integration site family, member 1 (Wnt1); wingless-type MMTV integration site family, member 4 (Wnt4); WNT signaling pathway regulator (Apc); WW domain containing E3 ubiquitin protein ligase 1 (Wwp1); XBP1; YAP1; ZAP70; ZC3H12A; zfp35; zinc finger and BTB domain containing 1 (Zbtb1); zinc finger and BTB domain containing 7B (Zbtb7B); zinc finger CCCH type containing 12A (Zc3h12a); zinc finger CCCH type containing 12D (Zc3h12d); zinc finger E-box binding homeobox 1 (Zeb1); zinc finger protein 36, C3H type (Zfp36); zinc finger protein 36, C3H type-like 1 (Zfp36L1); zinc finger protein 36, C3H type-like 2 (Zfp36L2); and zinc finger protein 683 (Zfp683).

[0285] Immune cells and/or immune effector cells can be isolated or purified from a sample collected from a subject/donor using standard techniques known in the art. For example, immune effector cells can be isolated or purified from a whole blood sample by lysing red blood cells and removing peripheral mononuclear blood cells by centrifugation. The immune effector cells can be further isolated or purified using a selective purification method that isolates the immune effector cells based on cell-specific markers such as CD25, CD3, CD4, CD8, CD28, CD45RA, or CD45RO. In one embodiment, CD4⁺ is used as a marker to select T cells. In one embodiment, CD8⁺ is used as a marker to select T cells.

[0286] In another embodiment, the present disclosure provides T cells that have targeted gene knock-outs at the TCR constant region (TRAC), which is responsible for TCRαβ surface expression. TCRαβ-deficient CAR-T cells are compatible with allogeneic immunotherapy (Qasim et al., Sci. Transl. Med. 9, eaaj2013 (2017); Valton et al., Mol Ther. 2015 September; 23 (9): 1507-1518). If desired, residual TCRαβ T cells are removed using CliniMACS magnetic bead depletion to minimize the risk of GVHD. In another embodiment, the present disclosure provides donor T cells selected ex vivo to recognize minor histocompatibility antigens expressed on recipient hematopoietic cells, thereby minimizing the risk of graft-versus-host disease (GVHD), which is the main cause of morbidity and mortality after transplantation (Warren et al., Blood 2010; 115(19):3869-3878).

[0287] Another technique for isolating or purifying immune effector cells is flow cytometry. In fluorescence activated cell sorting a fluorescently labelled antibody with affinity for an immune effector cell marker is used to label immune effector cells in a sample. A gating strategy appropriate for the cells expressing the marker is used to segregate the cells. For example, T lymphocytes can be separated from other cells in a sample by using, for example, a fluorescently labeled antibody specific for an immune effector cell marker (e.g., CD4, CD8, CD28, CD45) and corresponding gating strategy. In one embodiment, a CD4 gating strategy is employed. In one embodiment, a CD8 gating strategy is employed. In one embodiment, a CD4 and CD8 gating strategy is employed. In some embodiments, a gating strategy for other markers specific to an immune effector cell is employed instead of, or in combination with, the CD4 and/or CD8 gating strategy.

[0288] In embodiments, the immune effector cells contemplated in the present disclosure are effector T cells. In some embodiments, the effector T cell is a naïve CD8+ T cell, a cytotoxic T cell, a natural killer T (NKT) cell, or a natural killer (NK) cell. In some embodiments, the effector T cells are thymocytes, immature T lymphocytes, mature T lymphocytes, resting T lymphocytes, or activated T lymphocytes. In some embodiments the immune effector cell is a CD4⁺ CD8⁺ T cell or a CD4⁻ CD8⁻ T cell. In some embodiments the immune effector cell is a T helper cell. In some embodiments the T helper cell is a T helper 1 (Th1), a T helper 2 (Th2) cell, or a helper T cell expressing CD4 (CD4+ T cell). In some embodiments, immune effector cells are effector NK cells. In some embodiments, the immune effector cell is any other subset of T cells. The modified immune effector cell may express, in addition to the chimeric antigen receptor (CAR), an exogenous cytokine, a different chimeric receptor, or any other agent that would enhance immune effector cell signaling or function. For example, co-expression of the chimeric antigen receptor and a cytokine may enhance the CAR-T cell's ability to lyse a target cell.

[0289] Provided herein are also polynucleotides that encode the chimeric antigen receptors (CARs) described herein. In some embodiments, the nucleic acid molecule is isolated or purified. Delivery of the nucleic acid molecules ex vivo can be accomplished using methods known in the art. For example, immune cells obtained from a subject may be transformed with a nucleic acid vector encoding the chimeric antigen receptor. The vector may then be used to transform recipient immune cells so that these cells will then express the chimeric antigen receptor. Efficient means of transforming immune cells include transfection and transduction. Such methods are well known in the art. For example, applicable methods for delivery the nucleic acid molecule encoding the chimeric antigen receptor (and the nucleic acid(s) encoding the base editor) can be found in International Application No. PCT/US2009/040040 and U.S. Pat. Nos. 8,450,112; 9,132,153; and 9,669,058, each of which is incorporated herein in its entirety. Additionally, those methods and vectors described herein for delivering the nucleic acid encoding the base editor are applicable to delivering the nucleic acid encoding the chimeric antigen receptor.

[0290] Some aspects of the present disclosure provide for immune cells comprising a chimeric antigen receptor (CAR) and an altered endogenous gene that provides resistance to development of an exhausted phenotype after repeated or continuous exposure to an antigen and/or increased persistence, resistance to fratricide, enhances immune cell function, resistance to immunosuppression or inhibition, or a combination thereof. In some embodiments, the altered endogenous gene may be created by base editing. In some embodiments, the base editing may reduce or attenuate the gene expression. In some embodiments, the base editing may reduce or attenuate the gene activation. In some embodiments, the base editing may reduce or attenuate the functionality of the gene product. In some other embodiments, the base editing may activate or enhance the gene expression. In some embodiments, the base editing may increase the functionality of the gene product. In some embodiments, the altered endogenous gene may be modified or edited in a start codon, an exon, an intron, a splice acceptor site, a splice donor site, an exon-intron injunction, or a regulatory element thereof. The modification may be edit to a single nucleobase in a gene or a regulatory element thereof. The modification may be in a exon, more than one exons, an intron, or more than one introns, or a combination thereof. The modification may be in an open reading frame of a gene. The modification may be in an untranslated region of the gene, for example, a 3′-UTR or a 5′-UTR. In some embodiments, the modification is in a regulatory element of an endogenous gene. In some embodiments, the modification is in a promoter, an enhancer, an operator, a silencer, an insulator, a terminator, a transcription initiation sequence, a translation initiation sequence (e.g., a Kozak sequence), or any combination thereof.

[0291] Immune effector cells expressing an endogenous immune cell receptor and a chimeric antigen receptor (CAR) may recognize and attack host cells, a circumstance termed graft versus host disease (GVHD). The alpha component of the immune cell receptor complex is encoded by the TRAC gene, and in some embodiments, this gene is edited such that the alpha subunit of the TCR complex is nonfunctional or absent. Because this subunit is necessary for endogenous immune cell signaling, editing this gene can reduce the risk of graft versus host disease caused by allogeneic immune cells.

[0292] In some embodiments, editing of genes to provide resistance to development of an exhausted phenotype after repeated or continuous exposure to an antigen, increased persistence, fratricide resistance, enhance the function of the immune cell or to reduce immunosuppression or inhibition can occur in the immune cell before the cell is transformed to express a chimeric antigen receptor (CAR). In other aspects, editing of genes to provide resistance to development of an exhausted phenotype after repeated or continuous exposure to an antigen, increase persistence, provide fratricide resistance, enhance the function of the immune cell or to reduce immunosuppression or inhibition can occur in a CAR-T cell, i.e., after the immune cell has been transformed to express a chimeric antigen receptor (CAR).

[0293] In some embodiments, the immune cell may comprise one or more edited genes, one or more regulatory elements thereof, or combinations thereof, wherein expression of the edited gene is either knocked out or knocked down. In some embodiments, the immune cell may comprise one or more edited genes, one or more regulatory elements thereof, or combinations thereof, wherein expression of the edited gene is increased. In some embodiments, the immune cell may comprise a chimeric antigen receptor (CAR) and one or more edited genes, one or more regulatory elements thereof, or combinations thereof, wherein expression of the edited gene is either knocked out or knocked down. In some embodiments, the immune cell may comprise a chimeric antigen receptor (CAR) and one or more edited genes, one or more regulatory elements thereof, or combinations thereof, wherein expression of the edited gene is increased.

[0294] In some embodiments, the CAR-T cells have reduced (e.g., a negative alteration of at least 10%, 25%, 50%, 75%, or 100%) or inactivated surface HLA class-I expression as compared to a similar CAR-T cell lacking one or more edited genes as described herein. In some embodiments, the CAR-T cells have resistance to development of an exhausted phenotype after repeated or continuous exposure to an antigen as compared to a similar CAR-T cell lacking one or more edited genes as described herein. In some embodiments, the CAR-T cells have increased persistence as compared to a similar CAR-T cell lacking one or more edited genes as described herein. In some embodiments, the CAR-T cells have increased fratricide resistance as compared to a similar CAR-T cell lacking one or more edited genes as described herein. In some embodiments, the CAR-T cells have reduced immunogenicity as compared to a similar CAR-T cell lacking one or more edited genes as described herein. In some embodiments, the CAR-T cells have lower activation threshold as compared to a similar CAR-T lacking one or more edited genes as described herein. In some embodiments, the CAR-T cells have increased anti-neoplasia activity as compared to a similar CAR-T cell lacking one or more edited genes as described herein. In some embodiments, the CAR-T cells have increased T- and/or NK-cell resistance as compared to a similar CAR-T cell lacking one or more edited genes as described herein. The one or more genes may be edited by base editing. In some embodiments the one or more genes are directed to components of the peptide loading complex (PLC) or regulatory components thereof. In some embodiments the one or more genes may be selected from a group consisting of: β2M, TAP1, TAP2, Tapasin, and CD58. In some embodiments, the one or more genes may be selected from the group consisting of FKBP1A, NR3C1, and PPIA. In some embodiments, the one or more genes are selected from the group consisting of B2M, CD3e, CD3g, CIITA, PD1, and TRAC. In embodiments, the gene corresponds to an antigen targeted by a CAR expressed by the cell. In some the genes may be edited by base editing and or using a nuclease (e.g., Cas12b). In some cases, the one or more genes are selected from CD58, CD115, CD48, MICA, MICB, Nectin-2, ULBP, β2M, TAP1, TAP2, TAPBP, PDIA3, NLRC5, HLA-A, HLA-B, and/or HLA-C. In some embodiments, one or more additional genes may be edited using a base editor or nuclease. In some embodiments, the one or more additional genes may be selected from TRAC and CIITA. In some embodiments, the one or more additional genes edited may be selected from HLA-E, HLA-G, PD-L1, and CD47. In some embodiments, one or more of β2M, TAP1, TAP2, Tapasin, and/or CD58 are edited in combination with edits in each of HLA-E, HLA-G, PD-L1, and CD47.

[0295] In some embodiments, the one or more genes are selected from CD5, CD7, CD19, B2M, CD3γ, CIITA, CD3ε, and PD1. In some embodiments, the CAR-T cells contain modifications in genes encoding one or more of CD5, CD7, CD19, B2M, CD3γ, CIITA, CD38, and PD1. In some embodiments, the CAR-T cells have reduced or undetectable expression of one or more of CD5, CD7, CD19, B2M, CD3γ, CIITA, CD3ε, and PD1 relative to a wild type or unedited T cell.

[0296] In some embodiments, an immune cell comprises a chimeric antigen receptor and one or more edited genes, a regulatory element thereof, or combinations thereof. An edited gene may be an immune response regulation gene, an immunogenic gene, a checkpoint inhibitor gene, a gene involved in immune responses, a cell surface marker, e.g., a T cell surface marker, or any combination thereof. In some embodiments, an immune cell comprises a chimeric antigen receptor and an edited gene that is associated with activated T cell proliferation, alpha-beta T cell activation, gamma-delta T cell activation, positive regulation of T cell proliferation, negative regulation of T-helper cell proliferation or differentiation, or their regulatory elements thereof, or combinations thereof. In some embodiments, the edited gene may be a checkpoint inhibitor gene, for example, such as a PD1 gene, a PDC1 gene, or a member related to or regulating the pathway of their formation or activation.

[0297] In some embodiments, provided herein is an immune cell with an edited gene in the peptide loading complex (PLC) or a regulatory element thereof, such that the immune cell does not express or expresses at reduced levels surface HLA class-I peptides. In some embodiments, provided herein is an immune cell with an edited gene in the peptide loading complex (PLC) or a regulatory element thereof, such that the immune cell has increased persistence. In some embodiments, the immune cell comprises an edited gene in the peptide loading complex (PLC) or a regulatory element thereof, and additionally, at least one edited gene.

[0298] In some embodiments, provided herein is an immune cell (e.g., T- or NK-cell) with an edited β2M gene, such that the immune cell does not express an endogenous functional Beta-2-microglobulin. In some embodiments, provided herein is an immune cell with an edited β2M gene, such that the immune cell does not express or expresses at reduced levels surface HLA class-I peptides. In some embodiments, provided herein is an immune cell with an edited β2M gene, such that the immune cell has increased persistence. In some embodiments, the immune cell comprises an edited β2M gene, and additionally, at least one edited gene.

[0299] In some embodiments, provided herein is an immune cell (e.g., T- or NK-cell) with an edited TAP1 gene, such that the immune cell does not express an endogenous functional TAP1. In some embodiments, provided herein is an immune cell with an edited TAP1 gene, such that the immune cell does not express or expresses at reduced levels surface HLA class-I peptides. In some embodiments, provided herein is an immune cell with an edited TAP1 gene, such that the immune cell has increased persistence. In some embodiments, the immune cell comprises an edited TAP1 gene, and additionally, at least one edited gene.

[0300] In some embodiments, provided herein is an immune cell (e.g., T- or NK-cell) with an edited TAP2 gene, such that the immune cell does not express an endogenous functional TAP2. In some embodiments, provided herein is an immune cell with an edited TAP2 gene, such that the immune cell does not express or expresses at reduced levels surface HLA class-I peptides. In some embodiments, provided herein is an immune cell with an edited TAP2 gene, such that the immune cell has increased persistence. In some embodiments, the immune cell comprises an edited TAP2 gene, and additionally, at least one edited gene.

[0301] In some embodiments, provided herein is an immune cell (e.g., T- or NK-cell) with edited TAP1 and TAP2 genes, such that the immune cell does not express endogenous functional TAP1 and TAP2. In some embodiments, provided herein is an immune cell with edited TAP1 and TAP 2 genes, such that the immune cell does not express or expresses at reduced levels surface HLA class-I peptides. In some embodiments, provided herein is an immune cell with an edited TAP1 and TAP2 gene, such that the immune cell has increased persistence. In some embodiments, the immune cell comprises an edited TAP1 and TAP2 gene, and additionally, at least one edited gene.

[0302] In some embodiments, provided herein is an immune cell (e.g., T- or NK-cell) with an edited Tapasin gene, such that the immune cell does not express an endogenous functional Tapasin. In some embodiments, provided herein is an immune cell with an edited Tapasin gene, such that the immune cell does not express or expresses at reduced levels surface HLA class-I peptides. In some embodiments, provided herein is an immune cell with an edited Tapasin gene, such that the immune cell has increased persistence. In some embodiments, the immune cell comprises an edited Tapasin gene, and additionally, at least one edited gene.

[0303] In some embodiments, provided herein is an immune cell (e.g., T- or NK-cell) with an edited CD58 gene, such that the immune cell does not express an endogenous functional CD58. In some embodiments, provided herein is an immune cell with an edited CD58 gene, such that the immune cell has increased persistence. In some embodiments, the immune cell comprises an edited CD58 gene, and additionally, at least one edited gene.

[0304] In some embodiments, provided herein is an immune cell (e.g., T- or NK-cell) with an edited CD54 gene, such that the immune cell does not express an endogenous functional CD54. In some embodiments, provided herein is an immune cell with an edited CD54 gene, such that the immune cell has increased persistence. In some embodiments, the immune cell comprises an edited CD54 gene, and additionally, at least one edited gene.

[0305] In some embodiments, each edited gene may comprise a single base edit. In some embodiments, each edited gene may comprise multiple base edits at different regions of the gene. In some embodiments, a single modification event (such as electroporation), may introduce one or more gene edits. In some embodiments at least one, two, three, four, five, six, seven, eight, nine, ten, eleven, twelve, thirteen, fourteen, fifteen, sixteen, seventeen, eighteen, nineteen, twenty or more edits may be introduced in one or more genes simultaneously. In some embodiments, an immune cell, including but not limited to any immune cell comprising an edited gene selected from any of the aforementioned gene edits, can be edited to generate mutations in other genes that enhance the CAR-T's function or reduce immunosuppression or inhibition of the cell.

### Chimeric Antigen Receptors and Car-T Cells

[0306] The disclosure provides immune cells modified using nucleobase editors described herein and that express chimeric antigen receptors (CARs). Modification of immune cells to express a chimeric antigen receptor can enhance an immune cell's immunoreactive activity, wherein the chimeric antigen receptor has an affinity for an epitope on an antigen, wherein the antigen is associated with an altered fitness of an organism. For example, the chimeric antigen receptor can have an affinity for an epitope on a protein expressed in a neoplastic cell. Because the CAR-T cells can act independently of major histocompatibility complex (MHC), activated CAR-T cells can kill the neoplastic cell expressing the antigen. The direct action of the CAR-T cell evades neoplastic cell defensive mechanisms that have evolved in response to MHC presentation of antigens to immune cells. Exemplary chimeric antigen receptors, modified immune cells, and methods for preparing the same are described in PCT Applications No. PCT/US2020/013964, PCT/US2020/052822, PCT/US2020/018178, PCT/US2021/52035, and PCT/US2022/075021, or in Hardke-Wolenski, et al., Biomedicines 10:1493 (2022), the disclosures of which are incorporated herein by reference in their entirety for all purposes.

[0307] However, target antigens associated with neoplastic cells may also be expressed on healthy immune cells. Accordingly, activated CAR-T cells not only kill neoplastic cells expressing the target antigen but also healthy immune cells that also express the target antigen. To prevent this fratricide or self-killing of immune cells, the disclosure provides a CAR-T that has been modified using nucleobase editors to reduce or eliminate the expression of a target antigen (e.g., CD19) to provide fratricide resistance. In some embodiments, the disclosure provides a fratricide resistant modified immune effector cell that expresses a chimeric antigen receptor to target a neoplastic cell.

[0308] Some embodiments comprise autologous immune cell immunotherapy, wherein immune cells are obtained from a subject having a disease or altered fitness characterized by cancerous or otherwise altered cells expressing a surface marker. The obtained immune cells are genetically modified to express a chimeric antigen receptor and are effectively redirected against specific antigens. Thus, in some embodiments, immune cells are obtained from a subject in need of CAR-T immunotherapy. In some embodiments, these autologous immune cells are cultured and modified shortly after they are obtained from the subject. In other embodiments, the autologous cells are obtained and then stored for future use. This practice may be advisable for individuals who may be undergoing parallel treatment that will diminish immune cell counts in the future. In allogeneic immune cell immunotherapy, immune cells can be obtained from a donor other than the subject who will be receiving treatment. In some embodiments, immune cells are obtained from a healthy subject or donor and are genetically modified to express a chimeric antigen receptor and are effectively redirected against specific antigens. The immune cells, after modification to express a chimeric antigen receptor, are administered to a subject for treating a disease, such as a neoplasia (e.g., B-, T-, or NK-cell malignancy). In some embodiments, immune cells to be modified to express a chimeric antigen receptor can be obtained from pre-existing stock cultures of immune cells.

[0309] Immune cells and/or immune effector cells can be isolated or purified from a sample collected from a subject or a donor using standard techniques known in the art. For example, immune effector cells can be isolated or purified from a whole blood sample by lysing red blood cells and removing peripheral mononuclear blood cells by centrifugation. The immune effector cells can be further isolated or purified using a selective purification method that isolates the immune effector cells based on cell-specific markers such as CD25, CD3, CD4, CD8, CD28, CD45RA, or CD45RO. In one embodiment, CD4⁺ is used as a marker to select T cells. In one embodiment, CD8⁺ is used as a marker to select T cells.

[0310] In another embodiment, the disclosure provides T cells that have targeted gene knockouts at the TCR constant region (TRAC), which is responsible for TCRαβ surface expression. TCRαβ-deficient CAR-T cells are compatible with allogeneic immunotherapy (Qasim et al., Sci. Transl. Med. 9, eaaj2013 (2017); Valton et al., Mol Ther. 2015 September; 23(9): 1507-1518). If desired, residual TCRαβ T cells are removed using CliniMACS magnetic bead depletion to minimize the risk of GVHD. In another embodiment, the disclosure provides donor T cells selected ex vivo to recognize minor histocompatibility antigens expressed on recipient hematopoietic cells, thereby minimizing the risk of graft-versus-host disease (GVHD), which is the main cause of morbidity and mortality after transplantation (Warren et al., Blood 2010; 115(19):3869-3878). Another technique for isolating or purifying immune effector cells is flow cytometry. In fluorescence activated cell sorting a fluorescently labelled antibody with affinity for an immune effector cell marker is used to label immune effector cells in a sample. A gating strategy appropriate for the cells expressing the marker is used to segregate the cells. For example, T lymphocytes can be separated from other cells in a sample by using, for example, a fluorescently labeled antibody specific for an immune effector cell marker (e.g., CD4, CD8, CD28, CD45) and corresponding gating strategy. In one embodiment, a CD4 gating strategy is employed. In one embodiment, a CD8 gating strategy is employed. In one embodiment, a CD4 and CD8 gating strategy is employed. In some embodiments, a gating strategy for other markers specific to an immune effector cell is employed instead of, or in combination with, the CD4 and/or CD8 gating strategy.

[0311] The immune effector cells contemplated in the disclosure include effector T cells. In some embodiments, the effector T cell is a naïve CD8⁺ T cell, a cytotoxic T cell, a natural killer T (NKT) cell, or a natural killer (NK) cell. In some embodiments, the effector T cells are thymocytes, immature T lymphocytes, mature T lymphocytes, resting T lymphocytes, or activated T lymphocytes. In some embodiments the immune effector cell is a CD4⁺ CD8⁺ T cell or a CD4⁻ CD8⁻ T cell. In some embodiments the immune effector cell is a T helper cell. In some embodiments the T helper cell is a T helper 1 (Th1), a T helper 2 (Th2) cell, or a helper T cell expressing CD4 (CD4+ T cell). In some embodiments, immune effector cells are effector NK cells. In some embodiments, the immune effector cell is any other subset of T cells. The modified immune effector cell may express, in addition to the chimeric antigen receptor, an exogenous cytokine, a different chimeric receptor, or any other agent that would enhance immune effector cell signaling or function. For example, co-expression of the chimeric antigen receptor and a cytokine may enhance the CAR-T cell's ability to lyse a target cell.

[0312] Chimeric antigen receptors as contemplated in the present disclosure comprise an extracellular binding domain, a transmembrane domain, and an intracellular domain. Binding of an antigen to the extracellular binding domain can activate the CAR-T cell and generate an effector response, which includes CAR-T cell proliferation, cytokine production, and other processes that lead to the death, inactivation, and/or neutralization of the antigen expressing cell. In some embodiments of the present disclosure, the chimeric antigen receptor further comprises a linker. In some embodiments, the linker is a (GGGGS)ₙ linker (SEQ ID NO: 172). In some embodiments, the linker is a (GGGGS)₃ linker (SEQ ID NO: 486). In some embodiments, a CAR of the present disclosure includes a leader peptide sequence (e.g., N-terminal to the antigen binding domain). An exemplary leader peptide amino acid sequence is:

(SEQ ID NO: 487
METDTLLLWVLLLWVPGSTG.

[0313] In various embodiments, the CAR-T specifically targets a cluster of differentiation 19 (CD19) polypeptide. In some embodiments, the CAR-T specifically targets CD5, CD7, CD19, CD20, CD22, CD79B, or ROR1.

[0314] Provided herein are also nucleic acids that encode the chimeric antigen receptors described herein. In some embodiments, the nucleic acid is isolated or purified. Delivery of the nucleic acids ex vivo can be accomplished using methods known in the art. For example, immune cells obtained from a subject may be transformed with a nucleic acid vector encoding the chimeric antigen receptor. The vector may then be used to transform recipient immune cells so that these cells will then express the chimeric antigen receptor. Efficient means of transforming immune cells include transfection and transduction. Such methods are well known in the art. For example, applicable methods for delivery the nucleic acid molecule encoding the chimeric antigen receptor (and the nucleic acid(s) encoding the base editor) can be found in International Application No. PCT/US2009/040040 and U.S. Pat. Nos. 8,450,112; 9,132,153; and 9,669,058, each of which is incorporated herein in its entirety. Additionally, those methods and vectors described herein for delivering the nucleic acid encoding the base editor are applicable to delivering the nucleic acid encoding the chimeric antigen receptor.

[0315] Some aspects of the present disclosure provide for immune cells comprising a chimeric antigen and an altered endogenous gene that provides a reduced tendency relative to unedited CAR-T cells to develop an exhausted phenotype after being stimulated by multiple antigen exposures or continuous exposure to an antigen, resistance to fratricide, enhances immune cell function, resistance to immunosuppression or inhibition, or a combination thereof. In some embodiments, the altered endogenous gene may be created by base editing. In some embodiments, the base editing may reduce or attenuate the gene expression. In some embodiments, the base editing may reduce or attenuate the gene activation. In some embodiments, the base editing may reduce or attenuate the functionality of the gene product. In some other embodiments, the base editing may activate or enhance the gene expression. In some embodiments, the base editing may increase the functionality of the gene product. In some embodiments, the altered endogenous gene may be modified or edited in an exon, an intron, an exon-intron injunction, or a regulatory element thereof. The modification may be edit to a single nucleobase in a gene or a regulatory element thereof. The modification may be in a exon, more than one exons, a start codon, a splice acceptor site, a splice donor site, an intron, or more than one introns, or a combination thereof. The modification may be in an open reading frame of a gene. The modification may be in an untranslated region of the gene, for example, a 3′-UTR or a 5′5′-UTR. In some embodiments, the modification is in a regulatory element of an endogenous gene. In some embodiments, the modification is in a promoter, an enhancer, an operator, a silencer, an insulator, a terminator, a transcription initiation sequence, a translation initiation sequence (e.g., a Kozak sequence), or any combination thereof.

[0316] Allogeneic immune cells expressing an endogenous immune cell receptor as well as a chimeric antigen receptor may recognize and attack host cells, a circumstance termed graft versus host disease (GVHD). The alpha component of the immune cell receptor complex is encoded by the TRAC gene, and in some embodiments, this gene is edited such that the alpha subunit of the TCR complex is nonfunctional or absent. Because this subunit is necessary for endogenous immune cell signaling, editing this gene can reduce the risk of graft versus host disease caused by allogeneic immune cells.

[0317] In some embodiments, editing of genes to provide a reduced tendency relative to unedited CAR-T cells to develop an exhausted phenotype after being stimulated by multiple antigen exposures or continuous exposure to an antigen, fratricide resistance, enhance the function of the immune cell or to reduce immunosuppression or inhibition can occur in the immune cell before the cell is transformed to express a chimeric antigen receptor. In other aspects, editing of genes to provide a reduced tendency relative to unedited CAR-T cells to develop an exhausted phenotype after being stimulated by multiple antigen exposures or continuous exposure to an antigen, fratricide resistance, enhance the function of the immune cell or to reduce immunosuppression or inhibition can occur in a CAR-T cell, i.e., after the immune cell has been transformed to express a chimeric antigen receptor.

[0318] In some embodiments, the immune cell may comprise a chimeric antigen receptor (CAR) and one or more edited genes (e.g., those genes listed herein), one or more regulatory elements thereof, or combinations thereof, wherein expression of the edited gene is either knocked out or knocked down. In some embodiments, the CAR-T cells have a reduced tendency to develop an exhausted phenotype after being stimulated by multiple antigen exposures or continuous exposure to an antigen as compared to a similar reference CAR-T cell not having the one or more edited genes as described herein. In some embodiments, the CAR-T cells have increased fratricide resistance as compared to a similar reference CAR-T cell not having the one or more edited genes as described herein. In some embodiments, the CAR-T cells have reduced immunogenicity as compared to a similar CAR-T cell but without further having the one or more edited genes as described herein. In some embodiments, the CAR-T cells have lower activation threshold as compared to a similar reference CAR-T not having the one or more edited genes as described herein. In some embodiments, the CAR-T cells have increased anti-neoplasia activity as compared to a similar reference CAR-T cell not having the one or more edited genes as described herein. The one or more genes may be edited by base editing.

[0319] In some embodiments, an immune cell comprises a chimeric antigen receptor and one or more edited genes, a regulatory element thereof, or combinations thereof. An edited gene may be an immune response regulation gene, an immunogenic gene, a checkpoint inhibitor gene, a gene involved in immune responses, a cell surface marker, e.g., a T cell surface marker, or any combination thereof. In some embodiments, an immune cell comprises a chimeric antigen receptor and an edited gene that is associated with activated T cell proliferation, alpha-beta T cell activation, gamma-delta T cell activation, positive regulation of T cell proliferation, negative regulation of T-helper cell proliferation or differentiation, or their regulatory elements thereof, or combinations thereof. In some embodiments, the edited gene may be a checkpoint inhibitor gene, such as a PD-1 gene, or a member related to or regulating the pathway of their formation or activation.

[0320] In some embodiments, provided herein is an immune cell with an edited gene (e.g., CD5, CD7, CD19, CD3e, CD3g, B2M, and/or CIITa), such that the immune cell does not express an endogenous functional polypeptide encoded by the gene. In some embodiments, provided herein is a CAR-T cell with an edited gene, such that the CAR-T cell exhibits reduced or negligible expression or no expression of endogenous polypeptide encoded by the gene. In embodiments, the gene encodes CD5, CD7, CD19, CD3e, CD3g, B2M, and/or CIITa.

[0321] In some embodiments, each edited gene may comprise a single base edit. In some embodiments, each edited gene may comprise multiple base edits at different regions of the gene. In some embodiments, a single modification event (such as electroporation), may introduce one or more gene edits. In some embodiments at least one, two, three, four, five, six, seven, eight, nine, ten, eleven, twelve, thirteen, fourteen, fifteen, sixteen, seventeen, eighteen, nineteen, twenty or more edits may be introduced in one or more genes simultaneously. In some embodiments, an immune cell, including but not limited to any immune cell comprising an edited gene selected from any of the aforementioned gene edits, can be edited to generate mutations in other genes that enhance the CAR-T's function or reduce immunosuppression or inhibition of the cell.

### Extracellular Binding Domain

[0322] The chimeric antigen receptors of the disclosure include an extracellular binding domain. The extracellular binding domain of a chimeric antigen receptor contemplated herein comprises an amino acid sequence of an antibody, or an antigen binding fragment thereof, that has an affinity for a specific antigen. In some embodiments, the antigen is a cluster of differentiation 19 (CD19) polypeptide, or a fragment thereof.

[0323] In some embodiments the chimeric antigen receptor comprises an amino acid sequence of an antibody. In some embodiments, the chimeric antigen receptor comprises the amino acid sequence of an antigen binding fragment of an antibody. The antibody (or fragment thereof) portion of the extracellular binding domain recognizes and binds to an epitope of an antigen. In some embodiments, the antibody fragment portion of a chimeric antigen receptor is a single chain variable fragment (scFv). An scFv comprises the light and variable fragments of a monoclonal antibody. In other embodiments, the antibody fragment portion of a chimeric antigen receptor is a multichain variable fragment, which comprises more than one extracellular binding domains and therefore bind to more than one antigen simultaneously. In a multiple chain variable fragment embodiment, a hinge region may separate the different variable fragments, providing necessary spatial arrangement and flexibility.

[0324] In some embodiments, the extracellular binding domain is an anti-CD19 scFv. In some cases, the extracellular binding domain is an anti-CD5, anti-CD7, anti-CD19, anti-CD20, anti-CD22, anti-CD79B, or anti-ROR1 scFv.

[0325] In other embodiments, the antibody portion of a chimeric antigen receptor comprises at least one heavy chain and at least one light chain. In some embodiments, the antibody portion of a chimeric antigen receptor comprises two heavy chains, joined by disulfide bridges and two light chains, wherein the light chains are each joined to one of the heavy chains by disulfide bridges. In some embodiments, the light chain comprises a constant region and a variable region. Complementarity determining regions residing in the variable region of an antibody are responsible for the antibody's affinity for a particular antigen. Thus, antibodies that recognize different antigens comprise different complementarity determining regions. Complementarity determining regions reside in the variable domains of the extracellular binding domain, and variable domains (i.e., the variable heavy and variable light) can be linked with a linker or, in some embodiments, with disulfide bridges. In some embodiments, the variable heavy chain and variable light chain are linked by a (GGGGS)ₙ linker (SEQ ID NO: 172), wherein the n is an integer from 1 to 10. In some embodiments, the linker is a (GGGGS)₃ linker (SEQ ID NO: 486).

[0326] In some embodiments, the antigen recognized and bound by the extracellular domain is a protein or peptide, a nucleic acid, a lipid, or a polysaccharide. Antigens can be heterologous, such as those expressed in a pathogenic bacteria or virus. Antigens can also be synthetic; for example, some individuals have extreme allergies to synthetic latex and exposure to this antigen can result in an extreme immune reaction. In some embodiments, the antigen is autologous, and is expressed on a diseased or otherwise altered cell.

[0327] For example, in some embodiments, the antigen is expressed in a neoplastic cell. In some embodiments, the neoplastic cell is a malignant T-, B-, or NK-cell. In some embodiments, the malignant T-, B-, or NK-cell is a malignant precursor T-, B-, or NK-cell. In some embodiments, the malignant T-, B-, or NK-cell is a malignant mature T-, B-, or NK-cell. Nonlimiting examples of neoplasia include B cell lymphoma, mantle cell lymphoma, T-cell acute lymphoblastic leukemia (T-ALL), mycosis fungoides (MF), Sézary syndrome (SS), Peripheral T/NK-cell lymphoma, Anaplastic large cell lymphoma ALK+, Primary cutaneous T-cell lymphoma, T-cell large granular lymphocytic leukemia, Angioimmunoblastic T/NK-cell lymphoma, Hepatosplenic T-cell lymphoma, Primary cutaneous CD30+lymphoproliferative disorders, Extranodal NK/T-cell lymphoma, Adult T-cell leukemia/lymphoma, T-cell prolymphocytic leukemia, Subcutaneous panniculitis-like T-cell lymphoma, Primary cutaneous gamma-delta T-cell lymphoma, Aggressive NK-cell leukemia, and Enteropathy-associated T-cell lymphoma.

[0328] Antibody-antigen interactions are noncovalent interactions resulting from hydrogen bonding, electrostatic or hydrophobic interactions, or from van der Waals forces. The affinity of extracellular binding domain of the chimeric antigen receptor for an antigen can be calculated with the following formula:

$${K}_{A} = [ Antibody - Antigen ] / [ Antibody ] [ Antigen ] , wherein$$

$$[ Ab ] = molar concentration of unoccupied binding sites on the antibody ;$$

$$[ Ag ] = molar concentration of unoccupied binding sites on the antigen ; and$$

$$[ Ab - Ag ] = molar concentration of the antibody - antigen complex .$$

[0329] The antibody-antigen interaction can also be characterized based on the dissociation of the antigen from the antibody. The dissociation constant (K_{D}) is the ratio of the association rate to the dissociation rate and is inversely proportional to the affinity constant. Thus, K_{D}=1/K_{A}. Those skilled in the art will be familiar with these concepts and will know that traditional methods, such as ELISA assays, can be used to calculate these constants.

### Transmembrane Domain

[0330] The chimeric antigen receptors of the disclosure include a transmembrane domain. The transmembrane domain of the chimeric antigen receptors described herein spans the CAR-T cell's lipid bilayer cellular membrane and separates the extracellular binding domain and the intracellular signaling domain. In some embodiments, this domain is derived from other receptors having a transmembrane domain, while in other embodiments, this domain is synthetic. In some embodiments, the transmembrane domain may be derived from a non-human transmembrane domain and, in some embodiments, humanized. By “humanized” is meant having the sequence of the nucleic acid encoding the transmembrane domain optimized such that it is more reliably or efficiently expressed in a human subject. In some embodiments, the transmembrane domain is derived from another transmembrane protein expressed in a human immune effector cell. Examples of such proteins include, but are not limited to, subunits of the T cell receptor (TCR) complex, PD1, or any of the Cluster of Differentiation proteins, or other proteins, that are expressed in the immune effector cell and that have a transmembrane domain. In some embodiments, the transmembrane domain will be synthetic, and such sequences will comprise many hydrophobic residues.

[0331] Transmembrane domains for use in the disclosed CARs can include at least the transmembrane region(s) of) the alpha, beta or zeta chain of the T-cell receptor, CD28, CD3 epsilon, CD45, CD4, CD5, CD8, CD9, CD16, CD22, CD33, CD37, CD64, CD80, CD86, CD134, CD137, CD154. In some embodiments, the transmembrane domain is derived from CD4, CD8α, CD28 and CD3ζ.

[0332] The chimeric antigen receptor is designed, in some embodiments, to comprise a spacer between the transmembrane domain and the extracellular domain, the intracellular domain, or both. Such spacers can be 1, 2, 3, 4, 5, 6, 7, 8, 9, 10, 11, 12, 13, 14, 15, 16, 17, 18, 19, or 20 amino acids in length. In some embodiments, the spacer can be 20, 30, 40, 50, 60, 70, 80, 90, or 100 amino acids in length. In still other embodiments the spacer can be between 100 and 500 amino acids in length. The spacer can be any polypeptide that links one domain to another and are used to position such linked domains to enhance or optimize chimeric antigen receptor function.

### Intracellular Signaling Domain

[0333] The chimeric antigen receptors of the disclosure include an intracellular signaling domain. The intracellular signaling domain is the intracellular portion of a protein expressed in a T cell that transduces a T cell effector function signal (e.g., an activation signal) and directs the T cell to perform a specialized function. T cell activation can be induced by a number of factors, including binding of cognate antigen to the T cell receptor on the surface of T cells and binding of cognate ligand to costimulatory molecules on the surface of the T cell. A T cell co-stimulatory molecule is a cognate binding partner on a T cell that specifically binds with a co-stimulatory ligand, thereby mediating a co-stimulatory response by the T cell, such as, but not limited to, proliferation. Co-stimulatory molecules include but are not limited to an MHC class I molecule. Activation of a T cell leads to immune response, Such as T cell proliferation and differentiation (see, e.g., Smith-Garvin et al., Annu. Rev. Immunol., 27:591-619, 2009). Exemplary T cell signaling domains are known in the art. Non-limiting examples include the CD35, CD8, CD28, CD27, CD154, GITR (TNFRSF18), CD134 (OX40), and CD137 (4-1BB) signaling domains.

[0334] The intracellular signaling domain of the chimeric antigen receptor contemplated herein comprises a primary signaling domain. In some embodiments, the chimeric antigen receptor comprises the primary signaling domain and a secondary, or co-stimulatory, signaling domain.

[0335] In some embodiments, the primary signaling domain comprises one or more immunoreceptor tyrosine-based activation motifs, or ITAMs. In some embodiments, the primary signaling domain comprises more than one ITAM. ITAMs incorporated into the chimeric antigen receptor may be derived from ITAMs from other cellular receptors. In some embodiments, the primary signaling domain comprising an ITAM may be derived from subunits of the TCR complex, such as CD3γ, CD3ε, CD3ζ, or CD3δ. In some embodiments, the primary signaling domain comprising an ITAM may be derived from FcRγ, FcRβ, CD5, CD22, CD79a, CD79b, or CD66d.

[0336] In some embodiments, the primary signaling domain is selected from the group consisting of CD8, CD28, CD134 (OX40), CD137 (4-1BB), and CD3ζ.

[0337] In some embodiments, the secondary, or co-stimulatory, signaling domain is derived from CD2, CD4, CD5, CD8α, CD28, CD83, CD134, CD137 (4-1BB), ICOS, or CD154, or a combination thereof. In some embodiments, the co-signaling domain is a cytoplasmic domain.

[0338] In some embodiments, the CAR comprises one or more signaling domains. In some embodiments, the CAR comprises a combination of signaling domains.

### Editing of Target Genes in Immune Cells

[0339] In some embodiments, provided herein is an immune cell with at least one modification in an endogenous gene or regulatory elements thereof. In some embodiments, the immune cell may comprise a further modification in at least one, two, three, four, five, six, seven, eight, nine, ten, eleven, twelve, thirteen, fourteen, fifteen, sixteen, seventeen, eighteen, nineteen, twenty or more endogenous genes or regulatory elements thereof. In some embodiments, the at least one modification is a single nucleobase modification. In some embodiments, the at least one modification is by base editing. The base editing may be positioned at any suitable position of the gene, or in a regulatory element of the gene. Thus, it may be appreciated that a single base editing at a start codon, for example, can completely abolish the expression of the gene. In some embodiments, the base editing may be performed at a site within an exon. In some embodiments, the base editing may be performed at a site on more than one exons. In some embodiments, the base editing may be performed at a start codon. In some embodiments, the base editing may be performed at a splice acceptor site. In some embodiments, the base editing may be performed at a splice donor site. In some embodiments, the base editing may be performed at any exon of the multiple exons in a gene. In some embodiments, base editing may introduce a premature STOP codon into an exon, resulting in either lack of a translated product or in a truncated that may be misfolded and thereby eliminated by degradation, or may produce an unstable mRNA that is readily degraded. In some embodiments, the immune cell is a T cell. In some embodiments, the immune cell is a CAR-T cell. In some embodiments, the immune cell is a NK cell.

[0340] In some embodiments, the immune cell is modified using prime editing. Methods for editing polynucleotide sequences using prime editing are well known in the art (see, e.g., Petrova I O, Smirnikhina S A. The Development, Optimization and Future of Prime Editing. Int J Mol Sci. 2023 Dec. 1; 24(23):17045. doi: 10.3390/ijms242317045, the disclosure of which is incorporated herein in its entirety by reference for all purposes). In some embodiments, the cell is modified using a CRISPR/Cas system. In some cases, expression of a gene in the cell may be disrupted through introduction of an insertion/deletion (indel) mutation to the gene using, e.g., a nuclease, such as a Cas12b or Cas9 protein, or through insertion of a heterologous polynucleotide sequence into the gene, such as through the use of a transposon or a CRISPR/Cas system.

[0341] In some embodiments, an edited gene may be an immune response regulation gene, an immunogenic gene, a checkpoint inhibitor gene, a gene involved in immune responses, a cell surface marker, e.g., a T cell surface marker, or any combination thereof. In some embodiments, the edited gene is associated with activated T cell proliferation, alpha-beta T cell activation, gamma-delta T cell activation, positive regulation of T cell proliferation, negative regulation of T-helper cell proliferation or differentiation, or their regulatory elements thereof, or combinations thereof. In some embodiments, the edited gene may be a checkpoint inhibitor gene.

[0342] In some embodiments, the gene is selected from those genes listed herein. Further non-limiting examples of genes that may be edited include those listed in any one of PCT Applications No. PCT/US2020/013964, PCT/US2020/052822, PCT/US2020/018178, PCT/US2021/52035, and PCT/US2022/075021, the disclosures of which are incorporated herein by reference in their entirety for all purposes.

[0343] In some embodiments, the editing of the endogenous gene reduces expression of the gene. In some embodiments, the editing of the endogenous gene reduces expression of the gene by at least 50% as compared to a control cell without the modification. In some embodiments, the editing of the endogenous gene reduces expression of the gene by at least 60% as compared to a control cell without the modification. In some embodiments, the editing of the endogenous gene reduces expression of the gene by at least 70% as compared to a control cell without the modification. In some embodiments, the editing of the endogenous gene reduces expression of the gene by at least 80% as compared to a control cell without the modification. In some embodiments, the editing of the endogenous gene reduces expression of the gene by at least 90% as compared to a control cell without the modification. In some embodiments, the editing of the endogenous gene reduces expression of the gene by at least 100% as compared to a control cell without the modification. In some embodiments, the editing of the endogenous gene eliminates gene expression.

[0344] In some embodiments, base editing may be performed on an intron. For example, base editing may be performed on an intron. In some embodiments, the base editing may be performed at a site within an intron. In some embodiments, the base editing may be performed at a site one or more introns. In some embodiments, the base editing may be performed at any exon of the multiple introns in a gene. In some embodiments, one or more base editing may be performed on an exon, an intron or any combination of exons and introns.

[0345] In some embodiments, the modification or base edit may be within a promoter site. In some embodiments, the base edit may be introduced within an alternative promoter site. In some embodiments, the base edit may be in a 5′ regulatory element, such as an enhancer. In some embodiment, base editing may be introduced to disrupt the binding site of a nucleic acid binding protein. Exemplary nucleic acid binding proteins may be a polymerase, nuclease, gyrase, topoisomerase, methylase or methyl transferase, transcription factors, enhancer, PABP, zinc finger proteins, among many others.

[0346] In some embodiments, base editing may be used for splice disruption to silence target protein expression. In some embodiments, base editing may generate a splice acceptor-splice donor (SA-SD) site. Targeted base editing generating a SA-SD, or at a SA-SD site can result in reduced expression of a gene. In some embodiments, base editors (e.g., ABE, CBE, CABE) are used to target dinucleotide motifs that constitute splice acceptor and splice donor sites, which are the first and last two nucleotides of each intron. In some embodiments, splice disruption is achieved with an adenosine base editor (ABE). In some embodiments, splice disruption is achieved with a cytidine base editor (CBE). In some embodiments, base editors (e.g., CBE, CABE) are used to edit exons by creating STOP codons.

[0347] In some embodiments, provided herein is an immune cell with at least one modification in one or more endogenous genes. In some embodiments, the immune cell may have at least one modification in one, two, three, four, five, six, seven, eight, nine, ten, eleven, twelve, thirteen, fourteen, fifteen, sixteen, seventeen, eighteen, nineteen, twenty or more endogenous genes. In some embodiments, the modification generates a premature stop codon in the endogenous genes. In some embodiments, the STOP codon silences target protein expression. In some embodiments, the modification is a single base modification. In some embodiments, the modification is generated by base editing. The premature stop codon may be generated in an exon, an intron, or an untranslated region. In some embodiments, base editing may be used to introduce more than one STOP codon, in one or more alternative reading frames. In some embodiments, the stop codon is generated by a adenosine base editor (ABE). In some embodiments, the stop codon is generated by a cytidine base editor (CBE). In some embodiments, the CBE generates any one of the following edits (shown in underlined font) to generate a STOP codon: CAG→TAG; CAA→TAA; CGA→TGA; TGG→TGA; TGG→TAG; or TGG→TAA.

[0348] In some embodiments, modification/base edits may be introduced at a 3′-UTR, for example, in a poly adenylation (poly-A) site. In some embodiments, base editing may be performed on a 5′-UTR region.

### Molecular Switches

[0349] In various embodiments, an immune cell (e.g., a CAR-T cell) of the disclosure expresses a molecular switch alternatively referred to as a “kill switch,” “suicide switch,” or “safety switch.” A kill switch is activated by a pharmaceutical agent (e.g., an antibody). When a kill switch is activated, the kill switch mediates killing of the cell expressing the kill switch. For example, in an embodiment, a kill switch expressed on the surface of a cell mediates the induction of complement-mediated killing of the cell in the presence of a monoclonal antibody (e.g., Rituximab). In some cases, a kill switch binds Rituximab.

[0350] Non-limiting examples of molecular switches include RQR1, RQR2, RQR3, RQR4, RQR8, RQR1G4S, RQR2G4S, RR, G4SRR, G4SRRG4S, G4SRRG4SCD8, G4SRRG4SCD28, G4SRRCD28, and QG4S, the amino acid sequences of which are listed in Table C, where each of “R” (e.g., CPYSNPSLC (SEQ ID NO: 488) or PAKPTTTACPYSNPSLC (SEQ ID NO: 489)), “R1” (e.g., PAKPTTTACPYSNPSLC (SEQ ID NO: 489)), “R2” (e.g., PAKPTTTACPYSNPSLC (SEQ ID NO: 489) or PAKPTTTCPYSNPSLC (SEQ ID NO: 490)), “R3,” “R4,” and “R8” represents a Rituximab-binding epitope, “Q” is a QBEnd10-binding epitope (e.g., ELPTQGTFSNVSTNVS), “G4S” represents a linker (e.g., GGGGS (SEQ ID NO: 172) or SGGGGS (SEQ ID NO: 491)), “CD8” represents a CD8 stalk domain (e.g., PAPRPPTPAPTIASQPLSLRPEACRPAAGGAVHTRGLDFACD (SEQ ID NO: 492)), and “CD28” represents a CD28 stalk domain (IEVMYPPPYLDNEKSNGTIIHVKGKHLCPSPLFPGPSKP (SEQ ID NO: 492)). In embodiments, the Rituximab-binding epitope is derived from CD20 and the QBEnd10-binding epitope is derived from CD34. Further non-limiting examples of molecular switches (e.g., “kill switches”), components thereof (e.g., Rituximab-binding or QBEnd10-binding epitopes), polypeptides (e.g., chimeric antigen receptors) comprising the molecular switches, and methods for use thereof suitable for use in embodiments of the disclosure include those polypeptides described in Patent Application Publications No. WO 2013/153391 or US 2018/0002435, and/or in Moghanloo, et al., Translational Oncology 14:101070 (2021), the disclosures of each of which are incorporated herein by reference in their entireties by reference for all purposes. In some cases, the kill switch is fused at the C-terminus or N-terminus thereof to a transmembrane domain (e.g., a CD8a transmembrane domain).

[0351] In various embodiments, the methods of the disclosure involve using a QBEnd10-binding epitope or other epitope derived from CD34 as a marker for use in cell sorting. A non-limiting example of a commercially available system for such cell sorting is the Miltenyi CD34 cliniMACS system. Cells binding QBEnd10 may be sorted by any method known in the art, such as a fluorescence activated cell sorting (FACS) based method.

[0352] Kill switches are genetically encoded elements integrated into CAR-T cells that allow the elimination of the introduced T cells in case of unexpected toxicities. The kill switch may be anchored to the surface of a cell. For example, in some cases, the kill switch is anchored to the surface of a cell by being fused to a transmembrane domain or by being fused to a membrane-bound protein, such as a chimeric antigen receptor (CAR). Kill switches are activated by being contacted with a pharmaceutical agent. These genes include inducible caspase 9 (iC9), truncated EGFR (tEGFR or EGFRt), herpes simplex virus thymidine kinase (HSV-TK), and CD20.

iCasp9

[0353] iCasp9 (inducible caspase 9) is a pro-apoptotic kill switch made by the fusion of a mutant FKBP12, a receptor for the immunosuppressant drug FK506, to a modified human caspase 9 using a flexible SGGGS-linker (SEQ ID NO: 750). The mutant FKBP12 moiety allows a small molecular chemical inducer of dimerization (CID) (AP1903/AP20187) to attach to it while it cannot bind to the wild-type FKBP12. The modified caspase 9 is a truncated protein without the physiological dimerization domain or caspase recruitment domain (CARD) to minimize basal signaling. Conditional intravenous administration of a CID (such as AP1903) produces crosslinking of the drug-binding domains of this chimeric protein that results in the dimerization of caspase 9, and thereby activates the downstream executioner caspase3 molecules, leading to apoptosis of the cells expressing the fusion protein. In-vitro and in-vivo experiments show that this safety switch can cause apoptosis of approximately 99% of donor T cells using a 10 nM dose of AP1903.

### HSV-TK

[0354] The Thymidine kinase (TK) derived from Herpes simplex viruses-1 (HSV-1) (HSV-TK), which has been probably evolved distinctly from TK1, the cell-cycle dependent cytosolic TK, can phosphorylate thymidine, various other pyrimidines, and also pyrimidine and purine analogs. Tri-phosphorylated nucleoside analogs are cytotoxic because they interfere with DNA synthesis. Several pro-drugs for the HSV-TK system have been evaluated, including ganciclovir (GCV), acyclovir (ACV), and brivudin (BVDU) and among them, GCV was found to be the most effective pro-drug for this system. By conditional administration of GCV, HSV-TK catalyzes the phosphorylation of GCV that produces a toxic GCV-triphosphate resulting in competitive inhibition of guanosine incorporation with subsequent inhibition of DNA synthesis and cellular death.

### CD20 and EGFRt Kill Switches

[0355] Another kill switch involves expression of a targetable component, such as a well-known surface antigen such as CD20 or the truncated epidermal growth factor receptor (EGFRt) in a cell. This approach allows a selective cell removal through the complement-dependent cytotoxicity (CDC) and antibody-dependent cell-mediated cytotoxicity (ADCC) after administration of a specific monoclonal antibody. Rituximab has been used as a clinically approved monoclonal antibody for CD20 and cetuximab for EGFRt. If an antibody has poor bio-distribution, poor tissue penetration, and/or has limited CDC/ADCC (complement dependent cytotoxicity/antibody-dependent cell-mediated cytotoxicity) capacity in a patient, these issues may be addressed by creating anti-idiotype CARs recognizing CD19-specific CARs or synthesizing a short peptide epitope (E-tag) in the extracellular domain of the CAR and using an anti-E-tag CAR in order to omit the anti-tumor CARs.

### Human Leukocyte Antigen (HLA) Single-Chain Trimers and Dimers (HLA^{SC} Molecules)

[0356] In various embodiments, an immune cell (e.g., a CAR-T cell) of the disclosure expresses a human leukocyte antigen (HLA) (e.g., HLA-E or HLA-G) single-chain trimer (SCT) and/or single-chain dimer (SCD). The single-chain trimer or single-chain dimer can be secreted or membrane-bound. In embodiments, a single-chain HLA dimer contains a cognate peptide (cPep) and an HLA domain (e.g., HLA-E or HLA-G). In embodiments, a single-chain HLA trimer contains a B2M domain, an HLA domain (e.g., HLA-E or HLA-G), and a cognate peptide. In some cases, the HLA single-chain trimer or dimer contains a transmembrane domain. In other cases, the HLA single-chain trimer or dimer does not contain any transmembrane domain.

[0357] HLA-E and HLA-G single-chain dimers and single-chain dimers can improve the ability of immune cells to evade NK cells. The SCTs and SCDs bind to the NKG2A inhibitory receptor of natural killer (NK) cells, thereby inhibiting the NK cells and preventing lysis of the immune cells thereby. In embodiments, the SCTs and SCDs allow immune cells expressing the same to resist allogeneic rejection mechanisms of a host subject.

[0358] Non-limiting examples of HLA single-chain trimers include polypeptides with the following elements, from N-terminus to C-terminus:
[0359] a) a cPep, at least a fragment of an HLA-G polypeptide, and at least a fragment of a β2M polypeptide;
[0360] b) at least a fragment of a β2M polypeptide, a cPep, and at least a fragment of an HLA-G polypeptide;
[0361] c) a cPep, at least a fragment of a β2M polypeptide, and at least a fragment of an HLA-G polypeptide; or
[0362] d) fragment of an HLA-G polypeptide, a cPep, and at least at least a fragment of a β2M polypeptide.

[0363] Non-limiting examples of HLA single-chain trimers and single-chain dimers include polypeptides with about or at least about 85%, 90%, 95%, 96%, 97%, 98%, 99%, or 100% sequence identity to those single-chain HLA trimers and dimers listed in Table A below:

TABLE E
Secreted HLA-E and HLA-G constructs. In Table A, the HLA domain is indicated
by underlined text, linkers are indicated by bold text, signal peptides (e.g., the signal
peptide of HLA-G, IL-2, or β2M) are indicated by italicized text, cognate peptides are
indicated by bold underlined text, an HLA-G5 intron tail is indicated by double-underlined
text, and the β2M domain is indicated by bold, italic, underlined text.
Construct: BTx_CM118

| | |
|---|---|
| HLA-G5 | MVVMAPRTLFLLLSGALTLTETWAGSHSMRYFSAAVSRPGRGEPRFIAM |
| isoform | GYVDDTQFVRFDSDSACPRMEPRAPWVEQEGPEYWEEETRNTKAHAQTD |
| | RMNLQTLRGYYNQSEASSHTLQWMIGCDLGSDGRLLRGYEQYAYDGKDY |
| | LALNEDLRSWTAADTAAQISKRKCEAANVAEQRRAYLEGTCVEWLHRYL |
| | ENGKEMLQRADPPKTHVTHHPVFDYEATLRCWALGFYPAEIILTWQRDG |
| | EDQTQDVELVETRPAGDGTFQKWAAVVVPSGEEQRYTCHVQHEGLPEPL |
| | MLRWSKEGDGGIMSVRESRSLSEDL (SEQ ID NO: 493) |

Construct: BTx_CM119

| | |
|---|---|
| HLA-G5 | MYRMQLLSCIALSLALVTNSGSHSMRYFSAAVSRPGRGEPRFIAMGYVD |
| + | DTQFVRFDSDSACPRMEPRAPWVEQEGPEYWEEETRNTKAHAQTDRMNL |
| IL-2 signal peptide | QTLRGYYNQSEASSHTLQWMIGCDLGSDGRLLRGYEQYAYDGKDYLALN |
| | EDLRSWTAADTAAQISKRKCEAANVAEQRRAYLEGTCVEWLHRYLENGK |
| | EMLQRADPPKTHVTHHPVFDYEATLRCWALGFYPAEIILTWQRDGEDQT |
| | QDVELVETRPAGDGTFQKWAAVVVPSGEEQRYTCHVQHEGLPEPLMLRW |
| | SKEGDGGIMSVRESRSLSEDL (SEQ ID NO: 494) |

Construct: BTx_CM120

| | |
|---|---|
| HLA-G5 | MYRMQLLSCIALSLALVTNSIQRTPKIQVYSRHPAENGKSNFLNCYVSG |
| Single chain trimer | FHPSDIEVDLLKNGERIEKVEHSDLSFSKDWSFYLLYYTEFTPTEKDEY |
| + | ACRVNHVTLSQPKIVKWDRDMGGGGSGGGGSGGGGSRIIPRHLQLGGGG |
| IL-2 signal peptide | SGGGGSGGGGSGGGGSGSHSMRYFSAAVSRPGRGEPRFIAMGYVDDTQF |
| | VRFDSDSACPRMEPRAPWVEQEGPEYWEEETRNTKAHAQTDRMNLQTLR |
| | GYYNQSEASSHTLQWMIGCDLGSDGRLLRGYEQYAYDGKDYLALNEDLR |
| | SWTAADTAAQISKRKCEAANVAEQRRAYLEGTCVEWLHRYLENGKEMLQ |
| | RADPPKTHVTHHPVFDYEATLRCWALGFYPAEIILTWQRDGEDQTQDVE |
| | LVETRPAGDGTFQKWAAVVVPSGEEQRYTCHVQHEGLPEPLMLRWSKEG |
| | DGGIMSVRESRSLSEDL (SEQ ID NO: 495) |

Construct: BTx_CM193

| | |
|---|---|
| HLA-E(ΔTM) | MSRSVALAVLALLSLSGLEAVMAPRTLFLGGGGSGGGGSGGGGSIQRTP |
| Single chain trimer | KIQVYSRHPAENGKSNFLNCYVSGFHPSDIEVDLLINGERIEKVEHSDL |
| + | SFSKDWSFYLLYYTEFTPTEKDEYACRVNHVTLSQPKIVKWDRDMGGGG |
| HLA-G5 intron tail | SGGGGSGGGGSGGGGSGSHSLKYFHTSVSRPGRGEPRFISVGYVDDTQF |
| | VRFDNDAASPRMVPRAPWMEQEGSEYWDRETRSARDTAQIFRVNLRTLR |
| | GYYNQSEAGSHTLQWMHGCELGPDGRFLRGYEQFAYDGKDYLTLNEDLR |
| | SWTAVDTAAQISEQKSNDASEAEHQRAYLEDTCVEWLHKYLEKGKETLL |
| | HLEPPKTHVTHHPISDHEATLRCWALGFYPAEITLTWQQDGEGHTQDTE |
| | LVETRPAGDGTFQKWAAVVVPSGEEQRYTCHVQHEGLPEPVTLRWSKEG |
| | DGGIMSVRESRSLSEDL (SEQ ID NO: 496) |

Construct: BTx_CM211

| | |
|---|---|
| HLA-E(ΔTM) | MSRSVALAVLALLSLSGLEAVMAPRTLFLGGSGGGASGGGSHSLKYFHT |
| ß2M (C-term) | SVSRPGRGEPRFISVGYVDDTQFVRFDNDAASPRMVPRAPWMEQEGSEY |
| Single chain trimer | WDRETRSARDTAQIFRVNLRTLRGYYNQSEAGSHTLQWMHGCELGPDGR |
| | FLRGYEQFAYDGKDYLTLNEDLRSWTAVDTAAQISEQKSNDASEAEHQR |
| | AYLEDTCVEWLHKYLEKGKETLLHLEPPKTHVTHHPISDHEATLRCWAL |
| | GFYPAEITLTWQQDGEGHTQDTELVETRPAGDGTFQKWAAVVVPSGEEQ |
| | RYTCHVQHEGLPEP+ VTLRWGGGGSGGGGSGGGGSIQRTPKIQVYSRHPA |
| | ENGKSNFLNCYVSGFHPSDIEVDLLKNGERIEKVEHSDLSFSKDWSFYL |
| | LYYTEFTPTEKDEYACRVNHVTLSQPKIVKWDRDM (SEQ ID NO: 497) |

Construct: BTx_CM212

| | |
|---|---|
| HLA-E(ΔTM) | MSRSVALAVLALLSLSGLEAVMAPRTLFLGGSGGGASGGGSHSLKYFHT |
| Single chain dimer | SVSRPGRGEPRFISVGYVDDTQFVRFDNDAASPRMVPRAPWMEQEGSEY |
| + | WDRETRSARDTAQIFRVNLRTLRGYYNQSEAGSHTLQWMHGCELGPDGR |
| HLA-G5 intron tail | FLRGYEQFAYDGKDYLTLNEDLRSWTAVDTAAQISEQKSNDASEAEHQR |
| | AYLEDTCVEWLHKYLEKGKETLLHLEPPKTHVTHHPISDHEATLRCWAL |
| | GFYPAEITLTWQQDGEGHTQDTELVETRPAGDGTFQKWAAVVVPSGEEQ |
| | RYTCHVQHEGLPEPVTLRWSKEGDGGIMSVRESRSLSEDL |
| | (SEQ ID NO: 498) |

Construct: BTx_CM213

| | |
|---|---|
| HLA-E(ΔTM) | MSRSVALAVLALLSLSGLEAVMAPRTLFLGGSGGGASGGGSHSLKYFHT |
| Single chain dimer | SVSRPGRGEPRFISVGYVDDTQFVRFDNDAASPRMVPRAPWMEQEGSEY |
| | WDRETRSARDTAQIFRVNLRTLRGYYNQSEAGSHTLQWMHGCELGPDGR |
| | FLRGYEQFAYDGKDYLTLNEDLRSWTAVDTAAQISEQKSNDASEAEHQR |
| | AYLEDTCVEWLHKYLEKGKETLLHLEPPKTHVTHHPISDHEATLRCWAL |
| | GFYPAEITLTWQQDGEGHTQDTELVETRPAGDGTFQKWAAVVVPSGEEQ |
| | RYTCHVQHEGLPEPVTLRW (SEQ ID NO: 499) |

[0364] A non-limiting examples of a membrane-bound HLA single-chain trimers include polypeptides containing an amino acid sequence with about or at least about 85%, 90%, 95%, 96%, 97%, 98%, 99%, or 100% sequence identity to the below amino acid sequence:

(SEQ ID NO: 500; BTx_CM188)
MSRSVALAVLALLSLSGLEAVMAPRTLFLGGGGSGGGGSGGGGSIQRTP
KIQVYSRHPAENGKSNFLNCYVSGFHPSDIEVDLLKNGERIEKVEHSDL
SFSKDWSFYLLYYTEFTPTEKDEYACRVNHVTLSQPKIVKWDRDMGGGG
SGGGGSGGGGSGGGGSGSHSLKYFHTSVSRPGRGEPRFISVGYVDDTQF
VRFDNDAASPRMVPRAPWMEQEGSEYWDRETRSARDTAQIFRVNLRTLR
GYYNQSEAGSHTLQWMHGCELGPDGRFLRGYEQFAYDGKDYLTLNEDLR
SWTAVDTAAQISEQKSNDASEAEHQRAYLEDTCVEWLHKYLEKGKETLL
HLEPPKTHVTHHPISDHEATLRCWALGFYPAEITLTWQQDGEGHTQDTE
LVETRPAGDGTFQKWAAVVVPSGEEQRYTCHVQHEGLPEPVTLRWKPAS
QPTIPIMALIVLGGVAGLLLFIGLGIFFCVRC.

[0365] In the above sequence, which corresponds to an HLA-E SCT (CD4TM) polypeptide, the HLA-E heavy chain domain is indicated by underlined text, linkers are indicated by bold text, the signal peptide is indicated by italicized text, the cognate peptide (alternatively, “peptide for presentation”) is indicated by bold underlined text, the β2M domain is indicated by bold, italic, underlined text, the CD4 transmembrane domain is indicated by plain text, and the CD4 truncated intracellular domain is indicated by double-underlined text.

### Editing of Target Genes

[0366] To produce the gene edits described herein, cells are contacted with one or more guide RNAs and a nucleobase editor polypeptide comprising a nucleic acid programmable DNA binding protein (napDNAbp) and a cytidine deaminase or adenosine deaminase or comprising one or more deaminases with cytidine deaminase and/or adenosine deaminase activity (e.g., a “dual deaminase” which has cytidine and adenosine deaminase activity). In some embodiments, cells to be edited are contacted with at least one nucleic acid, where the at least one nucleic acid encodes one or more guide RNAs and a nucleobase editor polypeptide containing a nucleic acid programmable DNA binding protein (napDNAbp) and a deaminase. In some embodiments, the gRNA comprises nucleotide analogs. In some instances, the gRNA is added directly to a cell. These nucleotide analogs can inhibit degradation of the gRNA from cellular processes. Tables 1, 2A, and 2B provide representative sequences to be used for gRNAs. In some embodiments, the gene edits described herein are introduced to a polynucleotide using prime editing. Methods for editing polynucleotide sequences using prime editing are well known in the art (see, e.g., Petrova I O, Smirnikhina S A. The Development, Optimization and Future of Prime Editing. Int J Mol Sci. 2023 Dec. 1; 24(23):17045. doi: 10.3390/ijms242317045, the disclosure of which is incorporated herein in its entirety by reference for all purposes). In some embodiments, the gene edits described herein are introduced to a polynucleotide using a CRISPR/Cas system. In some cases, expression of a gene may be disrupted through introduction of an insertion/deletion (indel) mutation to the gene using, e.g., a nuclease, such as a Cas 12b or Cas9 protein, or through insertion of a heterologous polynucleotide sequence into the gene, such as through the use of a transposon or a CRISPR/Cas system.

[0367] Variants of the spacer sequences provided herein comprising 1, 2, 3, 4, or 5 nucleobase alterations are contemplated. For example, variation of a target polynucleotide sequence within a population (e.g., single nucleotide polymorphisms) may require said alterations to a spacer sequence to allow the spacer to better bind a variant of a target sequence in a subject.

[0368] In various instances, it is advantageous for a spacer sequence to include a 5′ and/or a 3′ “G” nucleotide. In some cases, for example, any spacer sequence or guide polynucleotide provided herein comprises or further comprises a 5′ “G”, where, in some embodiments, the 5′ “G” is or is not complementary to a target sequence. In some embodiments, the 5′ “G” is added to a spacer sequence that does not already contain a 5′ “G.” For example, it can be advantageous for a guide RNA to include a 5′ terminal “G” when the guide RNA is expressed under the control of a U6 promoter or the like because the U6 promoter prefers a “G” at the transcription start site (see Cong, L. et al. “Multiplex genome engineering using CRISPR/Cas systems. Science 339:819-823 (2013) doi: 10.1126/science.1231143). In some cases, a 5′ terminal “G” is added to a guide polynucleotide that is to be expressed under the control of a promoter but is optionally not added to the guide polynucleotide if or when the guide polynucleotide is not expressed under the control of a promoter.

[0369] In embodiments, a guide RNA of the disclosure contains a scaffold. Non-limiting examples of scaffold nucleotide sequences include the following:

GUUUUAGAGCUAGAAAUAGCAAGUUAAAAUAAGGCUAGUCCGUUAUCAA
CUUGAAAAAGUGGCACCGAGUCGGUGCUUUU
(SEQ ID NO: 371; SpCas9 scaffold sequence);
GUUCUGUCUUUUGGUCAGGACAACCGUCUAGCUAUAAGUGCUGCAGGGU
GUGAGAAACUCCUAUUGCUGGACGAUGUCUCUUACGAGGCAUUAGCAC
(SEQ ID NO: 778; Cas12b scaffold sequence).

[0370] Exemplary guide RNA sequences are provided in Tables 1, 2A, and 2B below.

TABLE 1
Exemplary guide polynucleotide sequences.

| Guide | Alternative | | SEQ |
|---|---|---|---|
| Name | Name | Guide Polynucleotide Sequence | ID NO |
| TSBTx | Guide_210 | CUCACCGUCUCCUGGGGAGAGUUUUAGAGCUAGAAAUAGCAAG | 501 |
| 1538 | | UUAAAAUAAGGCUAGUCCGUUAUCAACUUGAAAAAGUGGCACC | |
| | | GAGUCGGUGCUUUU | |
| TSBTx | Guide_214 | ACCGGUGUAGUGCACCACGCGUUUUAGAGCUAGAAAUAGCAAG | 502 |
| 1542 | | UUAAAAUAAGGCUAGUCCGUUAUCAACUUGAAAAAGUGGCACC | |
| | | GAGUCGGUGCUUUU | |
| TSBTx | Guide_217 | UACCCAAGAACAGGGAGCUAGUUUUAGAGCUAGAAAUAGCAAG | 503 |
| 1545 | | UUAAAAUAAGGCUAGUCCGUUAUCAACUUGAAAAAGUGGCACC | |
| | | GAGUCGGUGCUUUU | |
| TSBTx | Guide_218 | CCCCAACAGAUCUGCCAUGGGUUUUAGAGCUAGAAAUAGCAAG | 504 |
| 1546 | | UUAAAAUAAGGCUAGUCCGUUAUCAACUUGAAAAAGUGGCACC | |
| | | GAGUCGGUGCUUUU | |
| TSBTx | Guide_253 | UUCACAGGGAUGCUUGAAGAGUUUUAGAGCUAGAAAUAGCAAG | 505 |
| 1581 | | UUAAAAUAAGGCUAGUCCGUUAUCAACUUGAAAAAGUGGCACC | |
| | | GAGUCGGUGCUUUU | |
| TSBTx | Guide_254 | CGCCGCCAUGGGAGUGCAGGGUUUUAGAGCUAGAAAUAGCAAG | 506 |
| 1582 | | UUAAAAUAAGGCUAGUCCGUUAUCAACUUGAAAAAGUGGCACC | |
| | | GAGUCGGUGCUUUU | |
| TSBTx | Guide_209 | CAGGUGGAAACCAUCUCCCCGUUUUAGAGCUAGAAAUAGCAAG | 507 |
| 1537 | | UUAAAAUAAGGCUAGUCCGUUAUCAACUUGAAAAAGUGGCACC | |
| | | GAGUCGGUGCUUUU | |
| TSBTx | Guide_211 | GCGCCCUGAGGAGACAGAGAGUUUUAGAGCUAGAAAUAGCAAG | 508 |
| 1539 | | UUAAAAUAAGGCUAGUCCGUUAUCAACUUGAAAAAGUGGCACC | |
| | | GAGUCGGUGCUUUU | |
| TSBTx | Guide_212 | CGCCCUGAGGAGACAGAGACGUUUUAGAGCUAGAAAUAGCAAG | 509 |
| 1540 | | UUAAAAUAAGGCUAGUCCGUUAUCAACUUGAAAAAGUGGCACC | |
| | | GAGUCGGUGCUUUU | |
| TSBTx | Guide_213 | CAAGCGCGGCCAGACCUGCGGUUUUAGAGCUAGAAAUAGCAAG | 510 |
| 1541 | | UUAAAAUAAGGCUAGUCCGUUAUCAACUUGAAAAAGUGGCACC | |
| | | GAGUCGGUGCUUUU | |
| TSBTx | Guide_215 | ACUCAUCUGUGAAAAGAACAGUUUUAGAGCUAGAAAUAGCAAG | 511 |
| 1543 | | UUAAAAUAAGGCUAGUCCGUUAUCAACUUGAAAAAGUGGCACC | |
| | | GAGUCGGUGCUUUU | |
| TSBTx | Guide_216 | CGAUGUGGAGCUUCUAAAACGUUUUAGAGCUAGAAAUAGCAAG | 512 |
| 1544 | | UUAAAAUAAGGCUAGUCCGUUAUCAACUUGAAAAAGUGGCACC | |
| | | GAGUCGGUGCUUUU | |
| TSBTx | Guide_249 | AGCAGGAGGUGAUCCGAGGCGUUUUAGAGCUAGAAAUAGCAAG | 513 |
| 1577 | | UUAAAAUAAGGCUAGUCCGUUAUCAACUUGAAAAAGUGGCACC | |
| | | GAGUCGGUGCUUUU | |
| TSBTx | Guide_250 | GCAGGAGGUGAUCCGAGGCUGUUUUAGAGCUAGAAAUAGCAAG | 514 |
| 1578 | | UUAAAAUAAGGCUAGUCCGUUAUCAACUUGAAAAAGUGGCACC | |
| | | GAGUCGGUGCUUUU | |
| TSBTx | Guide_251 | GUGAUCCGAGGCUGGGAAGAGUUUUAGAGCUAGAAAUAGCAAG | 515 |
| 1579 | | UUAAAAUAAGGCUAGUCCGUUAUCAACUUGAAAAAGUGGCACC | |
| | | GAGUCGGUGCUUUU | |
| TSBTx | Guide_252 | GAUCCGAGGCUGGGAAGAAGGUUUUAGAGCUAGAAAUAGCAAG | 516 |
| 1580 | | UUAAAAUAAGGCUAGUCCGUUAUCAACUUGAAAAAGUGGCACC | |
| | | GAGUCGGUGCUUUU | |
| TSBTx | Guide_236 | AGGUUUCAGGAACUUACACCGUUUUAGAGCUAGAAAUAGCAAG | 517 |
| 1564 | | UUAAAAUAAGGCUAGUCCGUUAUCAACUUGAAAAAGUGGCACC | |
| | | GAGUCGGUGCUUUU | |
| TSBTx | Guide_238 | UACUCAUUAAUAAUCAGAUCGUUUUAGAGCUAGAAAUAGCAAG | 518 |
| 1566 | | UUAAAAUAAGGCUAGUCCGUUAUCAACUUGAAAAAGUGGCACC | |
| | | GAGUCGGUGCUUUU | |
| TSBTx | Guide_240 | ACCUGAAGAGAGAAGCAGUAGUUUUAGAGCUAGAAAUAGCAAG | 519 |
| 1568 | | UUAAAAUAAGGCUAGUCCGUUAUCAACUUGAAAAAGUGGCACC | |
| | | GAGUCGGUGCUUUU | |
| TSBTx | Guide_241 | AACCUUUUAGUUCCUAAGGAGUUUUAGAGCUAGAAAUAGCAAG | 520 |
| 1569 | | UUAAAAUAAGGCUAGUCCGUUAUCAACUUGAAAAAGUGGCACC | |
| | | GAGUCGGUGCUUUU | |
| TSBTx | Guide_247 | UUCCUUUAUAGAAUGUUAUGGUUUUAGAGCUAGAAAUAGCAAG | 521 |
| 1575 | | UUAAAAUAAGGCUAGUCCGUUAUCAACUUGAAAAAGUGGCACC | |
| | | GAGUCGGUGCUUUU | |
| TSBTx | Guide_219 | CUCCAAGCAGCGAAGACUUUGUUUUAGAGCUAGAAAUAGCAAG | 522 |
| 1547 | | UUAAAAUAAGGCUAGUCCGUUAUCAACUUGAAAAAGUGGCACC | |
| | | GAGUCGGUGCUUUU | |
| TSBTx | Guide_220 | GGGCCAAAUCAGCCUUUCCUGUUUUAGAGCUAGAAAUAGCAAG | 523 |
| 1548 | | UUAAAAUAAGGCUAGUCCGUUAUCAACUUGAAAAAGUGGCACC | |
| | | GAGUCGGUGCUUUU | |
| TSBTx | Guide_221 | GGCCAAAUCAGCCUUUCCUCGUUUUAGAGCUAGAAAUAGCAAG | 524 |
| 1549 | | UUAAAAUAAGGCUAGUCCGUUAUCAACUUGAAAAAGUGGCACC | |
| | | GAGUCGGUGCUUUU | |
| TSBTx | Guide_222 | GCCAAAUCAGCCUUUCCUCGGUUUUAGAGCUAGAAAUAGCAAG | 525 |
| 1550 | | UUAAAAUAAGGCUAGUCCGUUAUCAACUUGAAAAAGUGGCACC | |
| | | GAGUCGGUGCUUUU | |
| TSBTx | Guide_223 | CCAAAUCAGCCUUUCCUCGGGUUUUAGAGCUAGAAAUAGCAAG | 526 |
| 1551 | | UUAAAAUAAGGCUAGUCCGUUAUCAACUUGAAAAAGUGGCACC | |
| | | GAGUCGGUGCUUUU | |
| TSBTx | Guide_224 | CAACAUUUGAAGGGCCAGACGUUUUAGAGCUAGAAAUAGCAAG | 527 |
| 1552 | | UUAAAAUAAGGCUAGUCCGUUAUCAACUUGAAAAAGUGGCACC | |
| | | GAGUCGGUGCUUUU | |
| TSBTx | Guide_225 | GGCCAGACUGGCACCAACGGGUUUUAGAGCUAGAAAUAGCAAG | 528 |
| 1553 | | UUAAAAUAAGGCUAGUCCGUUAUCAACUUGAAAAAGUGGCACC | |
| | | GAGUCGGUGCUUUU | |
| TSBTx | Guide_226 | CAGGAUUUGGAGUUUUCUUCGUUUUAGAGCUAGAAAUAGCAAG | 529 |
| 1554 | | UUAAAAUAAGGCUAGUCCGUUAUCAACUUGAAAAAGUGGCACC | |
| | | GAGUCGGUGCUUUU | |
| TSBTx | Guide_227 | UACUGUCAGGCAAGCUUUCCGUUUUAGAGCUAGAAAUAGCAAG | 530 |
| 1555 | | UUAAAAUAAGGCUAGUCCGUUAUCAACUUGAAAAAGUGGCACC | |
| | | GAGUCGGUGCUUUU | |
| TSBTx | Guide_228 | GCUGUCCUAUAUGGAAUAAAGUUUUAGAGCUAGAAAUAGCAAG | 531 |
| 1556 | | UUAAAAUAAGGCUAGUCCGUUAUCAACUUGAAAAAGUGGCACC | |
| | | GAGUCGGUGCUUUU | |
| TSBTx | Guide_229 | CAGCACAAUUACCUAUGUGCGUUUUAGAGCUAGAAAUAGCAAG | 532 |
| 1557 | | UUAAAAUAAGGCUAGUCCGUUAUCAACUUGAAAAAGUGGCACC | |
| | | GAGUCGGUGCUUUU | |
| TSBTx | Guide_230 | CCGCUAUCGAAAAUGUCUUCGUUUUAGAGCUAGAAAUAGCAAG | 533 |
| 1558 | | UUAAAAUAAGGCUAGUCCGUUAUCAACUUGAAAAAGUGGCACC | |
| | | GAGUCGGUGCUUUU | |
| TSBTx | Guide_231 | UCUUCAGGCUGGAAUGAACCGUUUUAGAGCUAGAAAUAGCAAG | 534 |
| 1559 | | UUAAAAUAAGGCUAGUCCGUUAUCAACUUGAAAAAGUGGCACC | |
| | | GAGUCGGUGCUUUU | |
| TSBTx | Guide_232 | GGAAUUCAGCAGGCCACUACGUUUUAGAGCUAGAAAUAGCAAG | 535 |
| 1560 | | UUAAAAUAAGGCUAGUCCGUUAUCAACUUGAAAAAGUGGCACC | |
| | | GAGUCGGUGCUUUU | |
| TSBTx | Guide_233 | CAAGAAACCUCUGAAAAUCCGUUUUAGAGCUAGAAAUAGCAAG | 536 |
| 1561 | | UUAAAAUAAGGCUAGUCCGUUAUCAACUUGAAAAAGUGGCACC | |
| | | GAGUCGGUGCUUUU | |
| TSBTx | Guide_234 | ACCACAACUCACCCCUACCCGUUUUAGAGCUAGAAAUAGCAAG | 537 |
| 1562 | | UUAAAAUAAGGCUAGUCCGUUAUCAACUUGAAAAAGUGGCACC | |
| | | GAGUCGGUGCUUUU | |
| TSBTx | Guide_235 | ACCUGAAUUAAGAGAAAUAAGUUUUAGAGCUAGAAAUAGCAAG | 538 |
| 1563 | | UUAAAAUAAGGCUAGUCCGUUAUCAACUUGAAAAAGUGGCACC | |
| | | GAGUCGGUGCUUUU | |
| TSBTx | Guide_237 | UGACCCUACUGCAGUACUCCGUUUUAGAGCUAGAAAUAGCAAG | 539 |
| 1565 | | UUAAAAUAAGGCUAGUCCGUUAUCAACUUGAAAAAGUGGCACC | |
| | | GAGUCGGUGCUUUU | |
| TSBTx | Guide_239 | GCCUGUGAAAGAUAAAUAGCGUUUUAGAGCUAGAAAUAGCAAG | 540 |
| 1567 | | UUAAAAUAAGGCUAGUCCGUUAUCAACUUGAAAAAGUGGCACC | |
| | | GAGUCGGUGCUUUU | |
| TSBTx | Guide_242 | ACUCCAGCCAGAACUGGCAGGUUUUAGAGCUAGAAAUAGCAAG | 541 |
| 1570 | | UUAAAAUAAGGCUAGUCCGUUAUCAACUUGAAAAAGUGGCACC | |
| | | GAGUCGGUGCUUUU | |
| TSBTx | Guide_243 | UUAUCAACUGACAAAACUCUGUUUUAGAGCUAGAAAUAGCAAG | 542 |
| 1571 | | UUAAAAUAAGGCUAGUCCGUUAUCAACUUGAAAAAGUGGCACC | |
| | | GAGUCGGUGCUUUU | |
| TSBTx | Guide_244 | ACCACCUGCAAGAGAAGAUAGUUUUAGAGCUAGAAAUAGCAAG | 543 |
| 1572 | | UUAAAAUAAGGCUAGUCCGUUAUCAACUUGAAAAAGUGGCACC | |
| | | GAGUCGGUGCUUUU | |
| TSBTx | Guide_245 | CUAUUGCUUCCAAACAUUUUGUUUUAGAGCUAGAAAUAGCAAG | 544 |
| 1573 | | UUAAAAUAAGGCUAGUCCGUUAUCAACUUGAAAAAGUGGCACC | |
| | | GAGUCGGUGCUUUU | |
| TSBTx | Guide_246 | CAGAUACCAAAAUAUUCAAAGUUUUAGAGCUAGAAAUAGCAAG | 545 |
| 1574 | | UUAAAAUAAGGCUAGUCCGUUAUCAACUUGAAAAAGUGGCACC | |
| | | GAGUCGGUGCUUUU | |
| TSBTx | Guide_248 | UCAGGAGAGGGGAGAUGUGAGUUUUAGAGCUAGAAAUAGCAAG | 546 |
| 1576 | | UUAAAAUAAGGCUAGUCCGUUAUCAACUUGAAAAAGUGGCACC | |
| | | GAGUCGGUGCUUUU | |
| TSBTx | AYgRNA366 | GCCCGACCUCAAAGGAGACGGUUUUAGAGCUAGAAAUAGCAAG | 547 |
| 6143 | | UUAAAAUAAGGCUAGUCCGUUAUCAACUUGAAAAAGUGGCACC | |
| | | GAGUCGGUGCUUUU | |
| TSBTx | AYgRNA367 | CUUACAGCUGUUUGCAGACAGUUUUAGAGCUAGAAAUAGCAAG | 548 |
| 6144 | | UUAAAAUAAGGCUAGUCCGUUAUCAACUUGAAAAAGUGGCACC | |
| | | GAGUCGGUGCUUUU | |
| TSBTx | AYgRNA368 | AUGGACCAACCUGCUGUCUUGUUUUAGAGCUAGAAAUAGCAAG | 549 |
| 6145 | | UUAAAAUAAGGCUAGUCCGUUAUCAACUUGAAAAAGUGGCACC | |
| | | GAGUCGGUGCUUUU | |
| TSBTx | AYgRNA369 | CGUACCUGACACAUAAACCCGUUUUAGAGCUAGAAAUAGCAAG | 550 |
| 6146 | | UUAAAAUAAGGCUAGUCCGUUAUCAACUUGAAAAAGUGGCACC | |
| | | GAGUCGGUGCUUUU | |
| TSBTx | AYgRNA370 | GUACCCUUACCACUCAGUCUGUUUUAGAGCUAGAAAUAGCAAG | 551 |
| 6147 | | UUAAAAUAAGGCUAGUCCGUUAUCAACUUGAAAAAGUGGCACC | |
| | | GAGUCGGUGCUUUU | |
| TSBTx | AYgRNA371 | UCUUCCUUUUCAAGGUUGGAGUUUUAGAGCUAGAAAUAGCAAG | 552 |
| 6148 | | UUAAAAUAAGGCUAGUCCGUUAUCAACUUGAAAAAGUGGCACC | |
| | | GAGUCGGUGCUUUU | |

TABLE 2A
Exemplary spacer sequences. The term “PAM″ means “protospacer adjacent motif.”

| Guide | Alternative | | SEQ | | Target | Compatible |
|---|---|---|---|---|---|---|
| Name | Name | Spacer | ID NO | PAM | Gene | editor(s) |
| TSBTx | Guide_210 | CUCACCGUCUCCUGGGG | 553 | TGG | FKBP1A | ABE (e.g., |
| 1538 | | AGA | | | | ABE8.20m)/ |
| | | | | | | CBE (e.g., |
| | | | | | | rBE4) |
| TSBTx | Guide_214 | ACCGGUGUAGUGCACCA | 554 | AGG | FKBP1A | ABE (e.g., |
| 1542 | | CGC | | | | ABE8.20m)/ |
| | | | | | | CBE (e.g., |
| | | | | | | rBE4) |
| TSBTx | Guide_217 | UACCCAAGAACAGGGAG | 555 | AGG | FKBPIA | ABE (e.g., |
| 1545 | | CUA | | | | ABE8.20m)/ |
| | | | | | | CBE (e.g., |
| | | | | | | rBE4) |
| TSBTx | Guide_218 | CCCCAACAGAUCUGCCA | 556 | AGG | FKBP1A | ABE (e.g., |
| 1546 | | UGG | | | | ABE8.20m) |
| TSBTx | Guide_253 | UUCACAGGGAUGCUUGA | 557 | TGG | FKBP1A | ABE (e.g., |
| 1581 | | AGA | | | | ABE8.20m) |
| TSBTx | Guide_254 | CGCCGCCAUGGGAGUGC | 558 | TGG | FKBP1A | ABE (e.g., |
| 1582 | | AGG | | | | ABE8.20m) |
| TSBTx | Guide_209 | CAGGUGGAAACCAUCUC | 559 | AGG | FKBP1A | CBE (e.g., |
| 1537 | | CCC | | | | rBE4) |
| TSBTx | Guide_211 | GCGCCCUGAGGAGACAG | 560 | CGG | FKBP1A | CBE (e.g., |
| 1539 | | AGA | | | | rBE4) |
| TSBTx | Guide_212 | CGCCCUGAGGAGACAGA | 561 | GGG | FKBP1A | CBE (e.g., |
| 1540 | | GAC | | | | rBE4) |
| TSBTx | Guide_213 | CAAGCGCGGCCAGACCU | 562 | TGG | FKBP1A | CBE (e.g., |
| 1541 | | GCG | | | | rBE4) |
| TSBTx | Guide_215 | ACUCAUCUGUGAAAAGA | 563 | AGG | FKBPIA | CBE (e.g., |
| 1543 | | ACA | | | | rBE4) |
| TSBTx | Guide_216 | CGAUGUGGAGCUUCUAA | 564 | TGG | FKBP1A | CBE (e.g., |
| 1544 | | AAC | | | | rBE4) |
| TSBTx | Guide_249 | AGCAGGAGGUGAUCCGA | 565 | TGG | FKBPIA | CBE (e.g., |
| 1577 | | GGC | | | | rBE4) |
| TSBTx | Guide_250 | GCAGGAGGUGAUCCGAG | 566 | GGG | FKBP1A | CBE (e.g., |
| 1578 | | GCU | | | | rBE4) |
| TSBTx | Guide_251 | GUGAUCCGAGGCUGGGA | 567 | AGG | FKBP1A | CBE (e.g., |
| 1579 | | AGA | | | | rBE4) |
| TSBTx | Guide_252 | GAUCCGAGGCUGGGAAG | 568 | GGG | FKBP1A | CBE (e.g., |
| 1580 | | AAG | | | | rBE4) |
| TSBTx | Guide_236 | AGGUUUCAGGAACUUAC | 569 | TGG | NR3C1 | ABE |
| 1564 | | ACC | | | | |
| TSBTx | Guide_238 | UACUCAUUAAUAAUCAG | 570 | AGG | NR3C1 | ABE/CBE |
| 1566 | | AUC | | | | |
| TSBTx | Guide_240 | ACCUGAAGAGAGAAGCA | 571 | AGG | NR3C1 | ABE/CBE |
| 1568 | | GUA | | | | |
| TSBTx | Guide_241 | AACCUUUUAGUUCCUAA | 572 | CGG | NR3C1 | ABE |
| 1569 | | GGA | | | | |
| TSBTx | Guide_247 | UUCCUUUAUAGAAUGUU | 573 | TGG | NR3C1 | ABE |
| 1575 | | AUG | | | | |
| TSBTx | Guide_219 | CUCCAAGCAGCGAAGAC | 574 | TGG | NR3C1 | CBE |
| 1547 | | UUU | | | | |
| TSBTx | Guide_220 | GGGCCAAAUCAGCCUUU | 575 | CGG | NR3C1 | CBE |
| 1548 | | CCU | | | | |
| TSBTx | Guide_221 | GGCCAAAUCAGCCUUUC | 576 | GGG | NR3C1 | CBE |
| 1549 | | CUC | | | | |
| TSBTx | Guide_222 | GCCAAAUCAGCCUUUCC | 577 | GGG | NR3C1 | CBE |
| 1550 | | UCG | | | | |
| TSBTx | Guide_223 | CCAAAUCAGCCUUUCCU | 578 | GGG | NR3C1 | CBE |
| 1551 | | CGG | | | | |
| TSBTx | Guide_224 | CAACAUUUGAAGGGCCA | 579 | TGG | NR3C1 | CBE |
| 1552 | | GAC | | | | |
| TSBTx | Guide_225 | GGCCAGACUGGCACCAA | 580 | TGG | NR3C1 | CBE |
| 1553 | | CGG | | | | |
| TSBTx | Guide_226 | CAGGAUUUGGAGUUUUC | 581 | TGG | NR3C1 | CBE |
| 1554 | | UUC | | | | |
| TSBTx | Guide_227 | UACUGUCAGGCAAGCUU | 582 | TGG | NR3C1 | CBE |
| 1555 | | UCC | | | | |
| TSBTx | Guide_228 | GCUGUCCUAUAUGGAAU | 583 | AGG | NR3C1 | CBE |
| 1556 | | AAA | | | | |
| TSBTx | Guide_229 | CAGCACAAUUACCUAUG | 584 | TGG | NR3C1 | CBE |
| 1557 | | UGC | | | | |
| TSBTx | Guide_230 | CCGCUAUCGAAAAUGUC | 585 | AGG | NR3C1 | CBE |
| 1558 | | UUC | | | | |
| TSBTx | Guide_231 | UCUUCAGGCUGGAAUGA | 586 | TGG | NR3C1 | CBE |
| 1559 | | ACC | | | | |
| TSBTx | Guide_232 | GGAAUUCAGCAGGCCAC | 587 | AGG | NR3C1 | CBE |
| 1560 | | UAC | | | | |
| TSBTx | Guide_233 | CAAGAAACCUCUGAAAA | 588 | TGG | NR3C1 | CBE |
| 1561 | | UCC | | | | |
| TSBTx | Guide_234 | ACCACAACUCACCCCUA | 589 | TGG | NR3C1 | CBE |
| 1562 | | CCC | | | | |
| TSBTx | Guide_235 | ACCUGAAUUAAGAGAAA | 590 | AGG | NR3C1 | CBE |
| 1563 | | UAA | | | | |
| TSBTx | Guide_237 | UGACCCUACUGCAGUAC | 591 | TGG | NR3C1 | CBE |
| 1565 | | UCC | | | | |
| TSBTx | Guide_239 | GCCUGUGAAAGAUAAAU | 592 | GGC | NR3C1 | CBE |
| 1567 | | AGC | | | | |
| TSBTx | Guide_242 | ACUCCAGCCAGAACUGG | 593 | CGG | NR3C1 | CBE |
| 1570 | | CAG | | | | |
| TSBTx | Guide_243 | UUAUCAACUGACAAAAC | 594 | TGG | NR3C1 | CBE |
| 1571 | | UCU | | | | |
| TSBTx | Guide_244 | ACCACCUGCAAGAGAAG | 595 | TGG | NR3C1 | CBE |
| 1572 | | AUA | | | | |
| TSBTx | Guide_245 | CUAUUGCUUCCAAACAU | 596 | TGG | NR3C1 | CBE |
| 1573 | | UUU | | | | |
| TSBTx | Guide_246 | CAGAUACCAAAAUAUUC | 597 | TGG | NR3C1 | CBE |
| 1574 | | AAA | | | | |
| TSBTx | Guide_248 | UCAGGAGAGGGGAGAUG | 598 | TGG | NR3C1 | CBE |
| 1576 | | UGA | | | | |
| TSBTx | AYgRNA366 | GCCCGACCUCAAAGGAG | 599 | CGG | PPIA | ABE |
| 6143 | | ACG | | | | |
| TSBTx | AYgRNA367 | CUUACAGCUGUUUGCAG | 600 | AGG | PPIA | ABE |
| 6144 | | ACA | | | | |
| TSBTx | AYgRNA368 | AUGGACCAACCUGCUGU | 601 | TGG | PPIA | ABE |
| 6145 | | CUU | | | | |
| TSBTx | AYgRNA369 | CGUACCUGACACAUAAA | 602 | TGG | PPIA | ABE |
| 6146 | | CCC | | | | |
| TSBTx | AYgRNA370 | GUACCCUUACCACUCAG | 603 | TGG | PPIA | ABE |
| 6147 | | UCU | | | | |
| TSBTx | AYgRNA371 | UCUUCCUUUUCAAGGUU | 604 | TGG | PPIA | ABE |
| 6148 | | GGA | | | | |
| IMM_ | — | CCACCUGCACUCCCAUG | 779 | GTTT | FKBP1A | Cas12b |
| 288 | | GCGGC | | | | |
| IMM_ | — | CUUUCCAUCUUCAAGCA | 780 | ATTT | FKBP1A | Cas12b |
| 289 | | UCCCU | | | | |
| IMM_ | — | CUGUCCCGGGAGGAAUC | 781 | GTTT | FKBP1A | Cas12b |
| 290 | | AAAUU | | | | |
| IMM_ | — | GAUUCCUCCCGGGACAG | 782 | ATTT | FKBP1A | Cas12b |
| 291 | | AAACA | | | | |
| IMM_ | — | CUCCCGGGACAGAAACA | 783 | ATTC | FKBPIA | Cas12b |
| 292 | | AGCCC | | | | |
| IMM_ | — | AUGCUAGGCAAGCAGGA | 784 | GTTT | FKBP1A | Cas12b |
| 293 | | GGUGA | | | | |
| IMM_ | — | GGCUCUCUGACCCACAC | 785 | GTTT | FKBPIA | Cas12b |
| 294 | | UCAUC | | | | |
| IMM_ | — | UGCCUAUGGUGCCACUG | 786 | ATTA | FKBP1A | Cas12b |
| 295 | | GGCAC | | | | |
| IMM_ | — | UAGAAGCUCCACAUCGA | 787 | GTTT | FKBP1A | Cas12b |
| 296 | | AGACG | | | | |
| IMM_ | — | CAGUUUUAGAAGCUCCA | 788 | ATTC | FKBP1A | Cas12b |
| 297 | | CAUCG | | | | |
| IMM_ | — | CUGUCAUUCCAGUUUUA | 789 | ATTC | FKBPIA | Cas12b |
| 298 | | GAAGC | | | | |
| IMM_ | — | CCUUACCCAAGAACAGG | 790 | ATTT | FKBP1A | Cas12b |
| 299 | | GAGCU | | | | |
| IMM_ | — | AUGUGCACAUGUCUGGA | 791 | ATTC | FKBP1A | Cas12b |
| 300 | | GGCAC | | | | |
| IMM_ | — | CACCUGCACUCCCAUGG | 792 | TTTC | FKBP1A | Cas12b |
| 301 | | CGGCG | | | | |
| IMM_ | — | CAUCUUCAAGCAUCCCU | 793 | TTTC | FKBP1A | Cas12b |
| 302 | | GUGAA | | | | |
| IMM_ | — | AUUCCUCCCGGGACAGA | 794 | TTTG | FKBP1A | Cas12b |
| 303 | | AACAA | | | | |
| IMM_ | — | UUUCCAUCUUCAAGCAU | 795 | TTTC | FKBP1A | Cas12b |
| 304 | | CCCUG | | | | |
| IMM_ | — | UGUCCCGGGAGGAAUCA | 796 | TTTO | FKBP1A | Cas12b |
| 305 | | AAUUU | | | | |
| IMM_ | — | AGUUUAUGCUAGGCAAG | 797 | TTTA | FKBP1A | Cas12b |
| 306 | | CAGGA | | | | |
| IMM_ | — | UGCUAGGCAAGCAGGAG | 798 | TTTA | FKBP1A | Cas12b |
| 307 | | GUGAU | | | | |
| IMM_ | — | GCUCUCUGACCCACACU | 799 | TTTG | FKBP1A | Cas12b |
| 308 | | CAUCU | | | | |
| IMM_ | — | GAAGCUCCACAUCGAAG | 800 | TTTA | FKBPIA | Cas12b |
| 309 | | ACGAG | | | | |
| IMM_ | — | AGAAGCUCCACAUCGAA | 801 | TTTT | FKBP1A | Cas12b |
| 310 | | GACGA | | | | |
| IMM_ | — | CUUACCCAAGAACAGGG | 802 | TTTC | FKBP1A | Cas12b |
| 311 | | AGCUA | | | | |

TABLE 2B
Further exemplary spacer sequences.

| Polypeptide | | | |
|---|---|---|---|
| endoded by target | | | |
| polynucleotide | | | |
| (guide name in | | | Compatible |
| parenthesis) | Spacer | SEQ ID NO | base editor(s) |
| B2M | AAGUCAACUUCAAUGUCGGA | 605 | CBE, ABE |
| B2M | ACAAAGUCACAUGGUUCACA | 606 | CBE, ABE |
| B2M | ACAGCCCAAGAUAGUUAAGU | 607 | CBE |
| B2M | ACCCAGACACAUAGCAAUUC | 608 | CBE, ABE |
| B2M | ACUCACGCUGGAUAGCCUCC | 609 | CBE(e.g., |
| (TSBTx845) | | | rBE4), ABE |
| B2M | ACUUGUCUUUCAGCAAGGAC | 610 | CBE, ABE |
| B2M | AGUCACAUGGUUCACACGGC | 611 | CBE, ABE |
| B2M | AUACUCAUCUUUUUCAGUGG | 612 | CBE, ABE |
| B2M | CACAGCCCAAGAUAGUUAAG | 613 | CBE |
| B2M | CAGCCCAAGAUAGUUAAGUG | 614 | CBE |
| B2M | CAGUAAGUCAACUUCAAUGU | 615 | CBE, ABE |
| B2M | CAUACUCAUCUUUUUCAGUG | 616 | CBE, ABE |
| B2M | CGCGAGCACAGCUAAGGCCA | 617 | CBE, ABE |
| B2M | CGUGAGUAAACCUGAAUCUU | 618 | CBE |
| B2M | CUCACGCUGGAUAGCCUCC | 619 | CBE, ABE |
| B2M | CUCAGGUACUCCAAAGAUUC | 620 | |
| B2M | CUUACCCCACUUAACUAUCU | 621 | CBE, ABE |
| (TSBTx760) | | | (e.g., |
| | | | ABE8.20m) |
| B2M | GAAGUUGACUUACUGAAGAA | 622 | CBE, ABE |
| B2M | GAGUAGCGCGAGCACAGCUA | 623 | CBE, ABE |
| B2M | GCAUACUCAUCUUUUUCAGU | 624 | CBE, ABE |
| B2M | GCUACUCUCUCUUUCUGGCC | 625 | CBE, ABE |
| B2M | GGCAUACUCAUCUUUUUCAG | 626 | CBE, ABE |
| B2M | UACCCCACUUAACUAUCU | 627 | |
| B2M | UCACGCUGGAUAGCCUCC | 628 | CBE, ABE |
| B2M | UCGAUCUAUGAAAAAGACAG | 629 | ABE |
| B2M | UGGAGAGAGAAUUGAAAAAG | 630 | CBE, ABE |
| B2M | UGGAGUACCUGAGGAAUAUC | 631 | |
| B2M | UGGGCUGUGACAAAGUCACA | 632 | CBE, ABE |
| B2M | UUACCCCACUUAACUAUCUU | 633 | CBE, ABE |
| B2M | UUCAGACUUGUCUUUCAGCA | 634 | CBE, ABE |
| B2M | UUUGACUUUCCAUUCUCUGC | 635 | CBE, ABE |
| CD3e | ACACACUGUGGGGGGUGGGG | 636 | |
| CD3e | ACACAGACACGUGAGUUUAU | 637 | |
| CD3e | ACACUGUGGGGGGUGGGGUG | 638 | |
| CD3e | ACUCACCUGAUAAGAGGCAG | 639 | |
| CD3e | CACACUGUGGGGGGUGGGGU | 640 | |
| CD3e | CCGACUGCAUCUUUGUUUCA | 641 | |
| CD3e | CGUUACCUCAUAGUCUGGGU | 642 | |
| CD3e | CUGGAUUACCUCUUGCCCUC | 643 | ABE8.20m |
| (TSBTx4073) | | | |
| CD3e | GUUACCUCAUAGUCUGGGUU | 644 | |
| CD3e | UACCACCUGAAAAUGAAAAA | 645 | |
| CD3e | UAUAUGCUGGGGAGAAAGAA | 646 | |
| CD3e | UUAUAUGCUGGGGAGAAAGA | 647 | |
| CD3e | UUGUCCUGCGGAGGAAGGAG | 648 | |
| CD3e | UUUGUCCUGCGGAGGAAGGA | 649 | |
| CD3e | UUUUGUCCUGCGGAGGAAGG | 650 | |
| CD3g | ACAUACUUCUGUAAUACACU | 651 | |
| CD3g | ACCUUCAAGGAAACCAGUUG | 652 | |
| CD3g | CAUGGAACAGGGGAAGGGCC | 653 | |
| CD3g | CUCUUCCAUUGGGUACAUAA | 654 | |
| CD3g | CUUCAAGGUAAGGGCCUACU | 655 | |
| CD3g | GACCAGUACAGCCACCUUCA | 656 | |
| CD3g | UCUCCUACCUUUGAUUGACU | 657 | |
| CD3g | UGACCAGCUCUACCAGGUAA | 658 | |
| CD3g | UGACUAUCAAGAAGAUGGUU | 659 | |
| CD3g | UGGCCCAGUCAAUCAAAGGU | 660 | |
| CD3g | UUCUCCUACCUUUGAUUGAC | 661 | |
| CD3g | UUUAAACCAUGUGAUAUUUU | 662 | |
| CD7 | CCCUACCUGUCACCAGGACC | 663 | |
| CD19 | CCAGACCUCACCAUGGCCCC | 751 | |
| (TSBTx3773) | | | |
| CIITA | AAAGGCACUGCAAGAGACAA | 664 | |
| CIITA | ACACUCACUCCAUCACCCGG | 665 | |
| CIITA | ACAUCAAAGUACCCUACAGG | 666 | |
| CIITA | ACCGGCUCUGCAAAGGCCAG | 667 | |
| CIITA | ACCUCCCGAGCAAACAUGAC | 668 | |
| CIITA | ACUGGACCAGUAUGUCUUCC | 669 | |
| CIITA | AGACUCAGAGGUGAGAGGAG | 670 | |
| CIITA | AGCCAAGUACCCCCUCCCAG | 671 | |
| CIITA | AGCCCCAAGGUAAAAAGGCC | 672 | |
| CIITA | AGCCUAGGAGGCAAAGAGCA | 673 | |
| CIITA | AGGCCAUUUUGGAAGCUUGU | 674 | |
| CIITA | AGGCUGCAGGUGGAAUCAGA | 675 | |
| CIITA | CACAUCCUGCAAGGGGGGAU | 676 | |
| CIITA | CACUCACCUUAGCCUGAGCA | 677 | ABE8.20m/ |
| (TSBTx763) | | | rBE4 |
| CIITA | CACUCACUCCAUCACCCGGA | 678 | |
| CIITA | CACUCACUUGAGGGUUUCCA | 679 | |
| CIITA | CAGACAUCAAAGUACCCUAC | 680 | |
| CIITA | CAGACUGCGGGGACACAGUG | 681 | |
| CIITA | CAGCUCACAGUGUGCCACCA | 682 | |
| CIITA | CCACAUCCUGCAAGGGGGGA | 683 | |
| CIITA | CCACUCACCUUAGCCUGAGC | 684 | |
| CIITA | CCCACCCAAUGCCCGGCAGC | 685 | |
| CIITA | CCCCCAGGCUUUCCCCAAAC | 686 | |
| CIITA | CCUCCUGCAAUGCUUCCUGG | 687 | |
| CIITA | CCUGGUCCAGAGCCUGAGCA | 688 | |
| CIITA | CCUUACCUGUCAUGUUUGCU | 689 | |
| CIITA | CGCCCAGGUCCUCACGUCUG | 690 | |
| CIITA | CGUCCAGUACAACAAGUUCA | 691 | |
| CIITA | CUCUGGCAAAUCUCUGAGGC | 692 | |
| CIITA | CUGCCAAAUUCCAGCCUCCU | 693 | |
| CIITA | CUGGUCAGGGCAAGAGCUAU | 694 | |
| CIITA | CUUAGUCCAACACCCACCGC | 695 | |
| CIITA | CUUCCCCCAGCUGAAGUCCU | 696 | |
| CIITA | GAACGGCAGCUGGCCCAAGG | 697 | |
| CIITA | GACACGAGUGAUUGCUGUGC | 698 | |
| CIITA | GACCAGAUUCCCAGUAUGUU | 699 | |
| CIITA | GAGCCAGCCACAGGGCCCCC | 700 | |
| CIITA | GAGCCCCAAGGUAAAAAGGC | 701 | |
| CIITA | GCGUCCACAUCCUGCAAGGG | 702 | |
| CIITA | GGAAGCAGAAGGUGCUUGCG | 703 | |
| CIITA | GGCCCAAGGAGGCCUGGCUG | 704 | |
| CIITA | GGCGGGCCAAGACUUCUCCC | 705 | |
| CIITA | GGCGUCCACAUCCUGCAAGG | 706 | |
| CIITA | GGCUGCAGCCGGGGACACUG | 707 | |
| CIITA | GGGCCCACAGCCACUCGUGG | 708 | |
| CIITA | GGGCGUCCACAUCCUGCAAG | 709 | |
| CIITA | GUACAAGCUGUCGGAAACAG | 710 | |
| CIITA | UAACAUACUGGGAAUCUGGU | 711 | |
| CIITA | UAUGACCAGAUGGACCUGGC | 712 | |
| CIITA | UCACUCCAGAUGCUGCAGGG | 713 | |
| CIITA | UGCUCUGGAGAUGGAGAAGC | 714 | |
| CIITA | UGGGCGUCCACAUCCUGCAA | 715 | |
| CIITA | UGGUGCAGGCCAGGCUGGAG | 716 | |
| CIITA | UGUCUUCCAGGACUCCCAGC | 717 | |
| CIITA | UUCAACCAGGAGCCAGCCUC | 718 | |
| CIITA | UUCCAGAAGAAGCUGCUCCG | 719 | |
| CIITA | UUUUACCUUGGGGCUCUGAC | 720 | |
| PD1 | ACGACUGGCCAGGGCGCCUG | 721 | |
| PD1 | CACCUACCUAAGAACCAUCC | 722 | |
| PD1 | GGACCCAGACUAGCAGCACC | 723 | |
| PD1 | GGAGUCUGAGAGAUGGAGAG | 724 | |
| PD1 | GGGGUUCCAGGGCCUGUCUG | 725 | |
| PD1 | CCUCCUUCUUUGAGGAGAAA | 726 | |
| PD1 | CCAGUGGCGAGAGAAGACCC | 727 | |
| PD1 | UGCCCAGCCACUGAGGCCUG | 728 | |
| PD1 | CGACUGGCCAGGGCGCCUGU | 729 | |
| PD1 | ACCGCCCAGACGACUGGCCA | 730 | |
| PD1 | CACCGCCCAGACGACUGGCC | 731 | |
| PD1 | UUCUCUCUGGAAGGGCACAA | 732 | |
| PD1 | CUACAACUGGGCUGGCGGCC | 733 | |
| PD1 | GACGUUACCUCGUGCGGCCC | 734 | |
| PD1 | CAGCAACCAGACGGACAAGC | 735 | |
| PD1 | CCUGCAGAGAAACACACUUG | 736 | |
| PD1 | CAGUUCCAAACCCUGGUGGU | 737 | |
| PD1 | GUGUCACACAACUGCCCAAC | 738 | |
| PD1 | AGCCGGCCAGUUCCAAACCC | 739 | |
| PD1 | CGGCCAGUUCCAAACCCUGG | 740 | |
| PD1 | UCCCUGCAGAGAAACACACU | 741 | |
| PD1 | GAGACUCACCAGGGGCUGGC | 742 | |
| TRAC | CCAGCCAAGUACGUAAGUAG | 743 | |
| TRAC | CUGGAUAUCUGUGGGACAAG | 744 | |
| TRAC | CUUACCUGGGCUGGGGAAGA | 745 | |
| TRAC | GCUACAAACAAGCUCAUCUU | 746 | |
| TRAC | UUCAAAACCUGUCAGUGAUU | 747 | |
| TRAC | UUCGUAUCUGUAAAACCAAG | 748 | rBE4 |
| (TSBTx754) | | | |
| TRAC | UUUCAAAACCUGUCAGUGAU | 749 | |

### Nucleobase Editors

[0371] Useful in the methods and compositions described herein are nucleobase editors that edit, modify or alter a target nucleotide sequence of a polynucleotide. Nucleobase editors described herein typically include a polynucleotide programmable nucleotide binding domain and a nucleobase editing domain (e.g., adenosine deaminase, cytidine deaminase, or a dual deaminase). A polynucleotide programmable nucleotide binding domain, when in conjunction with a bound guide polynucleotide (e.g., gRNA), can specifically bind to a target polynucleotide sequence and thereby localize the base editor to the target nucleic acid sequence desired to be edited.

### Polynucleotide Programmable Nucleotide Binding Domain

[0372] Polynucleotide programmable nucleotide binding domains bind polynucleotides (e.g., RNA, DNA). A polynucleotide programmable nucleotide binding domain of a base editor can itself comprise one or more domains (e.g., one or more nuclease domains). In some embodiments, the nuclease domain of a polynucleotide programmable nucleotide binding domain comprises an endonuclease or an exonuclease.

[0373] Disclosed herein are base editors comprising a polynucleotide programmable nucleotide binding domain comprising all or a portion (e.g., a functional portion) of a CRISPR protein (i.e., a base editor comprising as a domain all or a portion (e.g., a functional portion) of a CRISPR protein (e.g., a Cas protein), also referred to as a “CRISPR protein-derived domain” of the base editor). A CRISPR protein-derived domain incorporated into a base editor can be modified compared to a wild-type or natural version of the CRISPR protein. A CRISPR protein-derived domain may comprise one or more mutations, insertions, deletions, rearrangements and/or recombinations relative to a wild-type or natural version of the CRISPR protein.

[0374] Cas proteins that can be used herein include class 1 and class 2. Non-limiting examples of Cas proteins include Cas1, Cas1B, Cas2, Cas3, Cas4, Cas5, Cas5d, Cas5t, Cas5h, Cas5a, Cas6, Cas7, Cas8, Cas9 (also known as Csn1 or Csx12), Cas10, Csy1, Csy2, Csy3, Csy4, Cse1, Cse2, Cse3, Cse4, Cse5e, Csc1, Csc2, Csa5, Csn1, Csn2, Csm1, Csm2, Csm3, Csm4, Csm5, Csm6, Cmr1, Cmr3, Cmr4, Cmr5, Cmr6, Csb1, Csb2, Csb3, Csx17, Csx14, Csx10, Csx16, CsaX, Csx3, Csx1, Csx1S, Csf1, Csf2, CsO, Csf4, Csd1, Csd2, Cst1, Cst2, Csh1, Csh2, Csa1, Csa2, Csa3, Csa4, Csa5, Cas12a/Cpf1, Cas12b/C2cl (e.g., SEQ ID NO: 232), Cas12c/C2c3, Cas12d/CasY, Cas12e/CasX, Cas12g, Cas12h, Cas12i, and Cas12j/CasΦ, CARF, DinG, homologues thereof, or modified versions thereof. A CRISPR enzyme can direct cleavage of one or both strands at a target sequence, such as within a target sequence and/or within a complement of a target sequence. For example, a CRISPR enzyme can direct cleavage of one or both strands within about 1, 2, 3, 4, 5, 6, 7, 8, 9, 10, 15, 20, 25, 50, 100, 200, 500, or more base pairs from the first or last nucleotide of a target sequence.

[0375] A vector that encodes a CRISPR enzyme that is mutated to with respect to a corresponding wild-type enzyme such that the mutated CRISPR enzyme lacks the ability to cleave one or both strands of a target polynucleotide containing a target sequence can be used. A Cas protein (e.g., Cas9, Cas12) or a Cas domain (e.g., Cas9, Cas12) can refer to a polypeptide or domain with at least or at least about 50%, 60%, 70%, 80%, 90%, 91%, 92%, 93%, 94%, 95%, 96%, 97%, 98%, 99%, or 100% sequence identity and/or sequence homology to a wild-type exemplary Cas polypeptide or Cas domain. Cas (e.g., Cas9, Cas12) can refer to the wild-type or a modified form of the Cas protein that may comprise an amino acid change such as a deletion, insertion, substitution, variant, mutation, fusion, chimera, or any combination thereof. In some embodiments, a CRISPR protein-derived domain of a base editor can include all or a portion (e.g., a functional portion) of Cas9 from Corynebacterium ulcerans (NCBI Refs: NC_015683.1, NC_017317.1); Corynebacterium diphtheria (NCBI Refs: NC_016782.1, NC_016786.1); Spiroplasma syrphidicola (NCBI Ref: NC_021284.1); Prevotella intermedia (NCBI Ref: NC_017861.1); Spiroplasma taiwanense (NCBI Ref: NC_021846.1); Streptococcus iniae (NCBI Ref: NC_021314.1); Belliella baltica (NCBI Ref: NC_018010.1); Psychroflexus torquis (NCBI Ref: NC_018721.1); Streptococcus thermophilus (NCBI Ref: YP_820832.1); Listeria innocua (NCBI Ref: NP_472073.1); Campylobacter jejuni (NCBI Ref: YP_002344900.1); Neisseria meningitidis (NCBI Ref: YP_002342100.1), Streptococcus pyogenes, or Staphylococcus aureus.

[0376] Some aspects of the disclosure provide high fidelity Cas9 domains. High fidelity Cas9 domains are known in the art and described, for example, in Kleinstiver, B. P., et al. “High-fidelity CRISPR-Cas9 nucleases with no detectable genome-wide off-target effects.” Nature 529, 490-495 (2016); and Slaymaker, I. M., et al. “Rationally engineered Cas9 nucleases with improved specificity.” Science 351, 84-88 (2015); the entire contents of each of which are incorporated herein by reference. An Exemplary high fidelity Cas9 domain is provided in the Sequence Listing as SEQ ID NO: 233.

[0377] In some embodiments, any of the Cas9 fusion proteins or complexes provided herein comprise one or more of a D10A, N497X, a R661X, a Q695X, and/or a Q926X mutation, or a corresponding mutation in any of the amino acid sequences provided herein, wherein X is any amino acid.

[0378] Typically, Cas9 proteins, such as Cas9 from S. pyogenes (spCas9), require a “protospacer adjacent motif (PAM)” or PAM-like motif, which is a 2-6 base pair DNA sequence immediately following the DNA sequence targeted by the Cas9 nuclease in the CRISPR bacterial adaptive immune system. The presence of an NGG PAM sequence is required to bind a particular nucleic acid region, where the “N” in “NGG” is adenosine (A), thymidine (T), or cytosine (C), and the G is guanosine. In some embodiments, any of the fusion proteins or complexes provided herein may contain a Cas9 domain that is capable of binding a nucleotide sequence that does not contain a canonical (e.g., NGG) PAM sequence. Cas9 domains that bind to non-canonical PAM sequences have been described in the art and would be apparent to the skilled artisan. For example, Cas9 domains that bind non-canonical PAM sequences have been described in Kleinstiver, B. P., et al., “Engineered CRISPR-Cas9 nucleases with altered PAM specificities” Nature 523, 481-485 (2015); and Kleinstiver, B. P., et al., “Broadening the targeting range of Staphylococcus aureus CRISPR-Cas9 by modifying PAM recognition” Nature Biotechnology 33, 1293-1298 (2015); the entire contents of each are hereby incorporated by reference.

[0379] In some embodiments, the napDNAbp is a circular permutant (e.g., SEQ ID NO: 238).

[0380] In some embodiments, the polynucleotide programmable nucleotide binding domain comprises a nickase domain. Herein the term “nickase” refers to a polynucleotide programmable nucleotide binding domain comprising a nuclease domain that is capable of cleaving only one strand of the two strands in a duplexed nucleic acid molecule (e.g., DNA). For example, where a polynucleotide programmable nucleotide binding domain comprises a nickase domain derived from Cas9, the Cas9-derived nickase domain can include a D10A mutation and a histidine at position 840. In another example, a Cas9-derived nickase domain comprises an H840A mutation, while the amino acid residue at position 10 remains a D.

[0381] In some embodiments, a Cas9 nuclease has an inactive (e.g., an inactivated) DNA cleavage domain, that is, the Cas9 is a nickase, referred to as an “nCas9” protein (for “nickase” Cas9; SEQ ID NO: 201). The Cas9 nickase may be a Cas9 protein that is capable of cleaving only one strand of a duplexed nucleic acid molecule (e.g., a duplexed DNA molecule). In some embodiments the Cas9 nickase comprises an amino acid sequence that is at least 60%, at least 65%, at least 70%, at least 75%, at least 80%, at least 85%, at least 90%, at least 95%, at least 96%, at least 97%, at least 98%, at least 99%, or at least 99.5% identical to any one of the Cas9 nickases provided herein. Additional suitable Cas9 nickases will be apparent to those of skill in the art based on this disclosure and knowledge in the field and are within the scope of this disclosure.

[0382] Also provided herein are base editors comprising a polynucleotide programmable nucleotide binding domain which is catalytically dead (i.e., incapable of cleaving a target polynucleotide sequence). For example, in the case of a base editor comprising a Cas9 domain, the Cas9 may comprise both a D10A mutation and an H840A mutation. In further embodiments, a catalytically dead polynucleotide programmable nucleotide binding domain comprises a point mutation (e.g., D10A or H840A) as well as a deletion of all or a portion (e.g., a functional portion) of a nuclease domain. dCas9 domains are known in the art and described, for example, in Qi et al., “Repurposing CRISPR as an RNA-guided platform for sequence-specific control of gene expression.” Cell. 2013; 152 (5): 1173-83, the entire contents of which are incorporated herein by reference.

[0383] The term “protospacer adjacent motif (PAM)” or PAM-like motif refers to a 2-6 base pair DNA sequence immediately following the DNA sequence targeted by a nucleic acid programmable DNA binding protein. In some embodiments, the PAM can be a 5′ PAM (i.e., located upstream of the 5′ end of the protospacer). In other embodiments, the PAM can be a 3′ PAM (i.e., located downstream of the 5′ end of the protospacer). The PAM sequence can be any PAM sequence known in the art. Suitable PAM sequences include, but are not limited to, NGG, NGA, NGC, NGN, NGT, NGTT, NGCG, NGAG, NGAN, NGNG, NGCN, NGCG, NGTN, NNGRRT, NNNRRT, NNGRR(N), TTTV, TYCV, TYCV, TATV, NNNNGATT, NNAGAAW, or NAAAAC. Y is a pyrimidine; N is any nucleotide base; W is A or T.

[0384] A base editor provided herein may comprise a CRISPR protein-derived domain that is capable of binding a nucleotide sequence that contains a canonical or non-canonical protospacer adjacent motif (PAM) sequence.

[0385] In some embodiments, the PAM is an “NRN” PAM where the “N” in “NRN” is adenine (A), thymine (T), guanine (G), or cytosine (C), and the R is adenine (A) or guanine (G); or the PAM is an “NYN” PAM, wherein the “N” in NYN is adenine (A), thymine (T), guanine (G), or cytosine (C), and the Y is cytidine (C) or thymine (T), for example, as described in R. T. Walton et al., 2020, Science, 10.1126/science.aba8853 (2020), the entire contents of which are incorporated herein by reference.

[0386] Several PAM variants are described in Table 3 below.

TABLE 3
Cas9 proteins and corresponding PAM sequences.
N is A, C, T, or G; and V is A, C, or G.

| Variant | PAM |
|---|---|
| spCas9 | NGG |
| spCas9-VRQR | NGA |
| spCas9-VRER | NGCG |
| xCas9 (sp) | NGN |
| saCas9 | NNGRRT |
| saCas9-KKH | NNNRRT |
| spCas9-LRKIQK | NGTN |
| spCas9-LRVSQK | NGTN |
| spCas9-LRVSQL | NGTN |
| Cpf1 | 5′ (TTTV) |
| SpyMac | 5′-NAA-3′ |

[0387] In some embodiments, the PAM is NGC. In some embodiments, the NGC PAM is recognized by a Cas9 variant. In some embodiments, the Cas9 variant contains one or more amino acid substitutions selected from D1135V, G1218R, R1335Q, and T1337R (collectively termed VRQR) of spCas9 (SEQ ID No: 197), or a corresponding mutation in another Cas9. In some embodiments, the Cas9 variant contains one or more amino acid substitutions selected from D1135V, G1218R, R1335E, and T1337R (collectively termed VRER) of spCas9 (SEQ ID No: 197), or a corresponding mutation in another Cas9. In some embodiments, the Cas9 variant contains one or more amino acid substitutions selected from E782K, N968K, and R1015H (collectively termed KHH) of saCas9 (SEQ ID NO: 218).

[0388] In some embodiments, a CRISPR protein-derived domain of a base editor comprises all or a portion (e.g., a functional portion) of a Cas9 protein with a canonical PAM sequence (NGG). In other embodiments, a Cas9-derived domain of a base editor can employ a non-canonical PAM sequence. Such sequences have been described in the art and would be apparent to the skilled artisan. For example, Cas9 domains that bind non-canonical PAM sequences have been described in Kleinstiver, B. P., et al., “Engineered CRISPR-Cas9 nucleases with altered PAM specificities” Nature 523, 481-485 (2015); and Kleinstiver, B. P., et al., “Broadening the targeting range of Staphylococcus aureus CRISPR-Cas9 by modifying PAM recognition” Nature Biotechnology 33, 1293-1298 (2015); R. T. Walton et al. “Unconstrained genome targeting with near-PAMless engineered CRISPR-Cas9 variants” Science 10.1126/science.aba8853 (2020); Hu et al. “Evolved Cas9 variants with broad PAM compatibility and high DNA specificity,” Nature, 2018 Apr. 5, 556 (7699), 57-63; Miller et al., “Continuous evolution of SpCas9 variants compatible with non-G PAMs” Nat. Biotechnol., 2020 April; 38 (4): 471-481; the entire contents of each are hereby incorporated by reference.

Fusion Proteins or Complexes Comprising a NapDNAbp and a Cytidine Deaminase and/or Adenosine Deaminase

[0389] Some aspects of the disclosure provide fusion proteins or complexes comprising a Cas9 domain or other nucleic acid programmable DNA binding protein (e.g., Cas12) and one or more cytidine deaminase, adenosine deaminase, or cytidine adenosine deaminase domains. It should be appreciated that the Cas9 domain may be any of the Cas9 domains or Cas9 proteins (e.g., dCas9 or nCas9) provided herein. In some embodiments, any of the Cas9 domains or Cas9 proteins (e.g., dCas9 or nCas9) provided herein may be fused with any of the cytidine deaminases and/or adenosine deaminases provided herein. The domains of the base editors disclosed herein can be arranged in any order.

[0390] In some embodiments, the fusion proteins or complexes comprising a cytidine deaminase or adenosine deaminase and a napDNAbp (e.g., Cas9 or Cas12 domain) do not include a linker sequence. In some embodiments, a linker is present between the cytidine or adenosine deaminase and the napDNAbp. In some embodiments, cytidine or adenosine deaminase and the napDNAbp are fused via any of the linkers provided herein. For example, in some embodiments the cytidine or adenosine deaminase and the napDNAbp are fused via any of the linkers provided herein.

[0391] It should be appreciated that the fusion proteins or complexes of the present disclosure may comprise one or more additional features. For example, in some embodiments, the fusion protein or complex may comprise inhibitors, cytoplasmic localization sequences, export sequences, such as nuclear export sequences, or other localization sequences, as well as sequence tags that are useful for solubilization, purification, or detection of the fusion proteins or complexes. Suitable protein tags provided herein include, but are not limited to, biotin carboxylase carrier protein (BCCP) tags, myc-tags, calmodulin-tags, FLAG-tags, hemagglutinin (HA)-tags, polyhistidine tags, also referred to as histidine tags or His-tags, maltose binding protein (MBP)-tags, nus-tags, glutathione-S-transferase (GST)-tags, green fluorescent protein (GFP)-tags, thioredoxin-tags, S-tags, Softags (e.g., Softag 1, Softag 3), strep-tags, biotin ligase tags, FlAsH tags, V5 tags, and SBP-tags. Additional suitable sequences will be apparent to those of skill in the art. In some embodiments, the fusion protein or complex comprises one or more His tags.

[0392] Exemplary, yet nonlimiting, fusion proteins are described in International PCT Application Nos. PCT/US2017/045381, PCT/US2019/044935, and PCT/US2020/016288, each of which is incorporated herein by reference for its entirety.

Fusion Proteins or Complexes with Internal Insertions

[0393] Provided herein are fusion proteins or complexes comprising a heterologous polypeptide fused to a nucleic acid programmable nucleic acid binding protein, for example, a napDNAbp. The heterologous polypeptide can be fused to the napDNAbp at a C-terminal end of the napDNAbp, an N-terminal end of the napDNAbp, or inserted at an internal location of the napDNAbp. In some embodiments, the heterologous polypeptide is a deaminase (e.g., cytidine or adenosine deaminase) or a functional fragment thereof. For example, a fusion protein may comprise a deaminase flanked by an N-terminal fragment and a C-terminal fragment of a Cas9 or Cas12 (e.g., Cas12b/C2c1), polypeptide

[0394] The deaminase can be a circular permutant deaminase. In some embodiments, the deaminase is a circular permutant TadA, circularly permutated at amino acid residue 116, 136, or 65 as numbered in a TadA reference sequence.

[0395] The fusion protein or complexes may comprise more than one deaminase. The fusion protein or complex may comprise, for example, 1, 2, 3, 4, 5 or more deaminases. The deaminases in a fusion protein or complex can be adenosine deaminases, cytidine deaminases, or a combination thereof.

[0396] In some embodiments, the napDNAbp in the fusion protein or complex contains a Cas9 polypeptide or a fragment thereof. The Cas9 polypeptide can be a variant Cas9 polypeptide. The Cas9 polypeptide can be a circularly permuted Cas9 protein.

[0397] The heterologous polypeptide (e.g., deaminase) can be inserted in the napDNAbp (e.g., Cas9 or Cas12 (e.g., Cas12b/C2c1)) at a suitable location, for example, such that the napDNAbp retains its ability to bind the target polynucleotide and a guide nucleic acid. A deaminase (e.g., adenosine deaminase, cytidine deaminase, or adenosine deaminase and cytidine deaminase (dual deaminase)) can be inserted into a napDNAbp without compromising function of the deaminase (e.g., base editing activity) or the napDNAbp (e.g., ability to bind to target nucleic acid and guide nucleic acid).

[0398] In some embodiments, the deaminase (e.g., adenosine deaminase, cytidine deaminase, or adenosine deaminase and cytidine deaminase) is inserted in regions of the Cas9 polypeptide comprising higher than average B-factors (e.g., higher B factors compared to the total protein or the protein domain comprising the disordered region). Cas9 polypeptide positions comprising a higher than average B-factor can include, for example, residues 768, 792, 1052, 1015, 1022, 1026, 1029, 1067, 1040, 1054, 1068, 1246, 1247, and 1248 as numbered in the above Cas9 reference sequence. Cas9 polypeptide regions comprising a higher than average B-factor can include, for example, residues 792-872, 792-906, and 2-791 as numbered in the above Cas9 reference sequence.

[0399] In some embodiments, a heterologous polypeptide (e.g., deaminase) is inserted in a flexible loop of a Cas9 polypeptide. The flexible loop portions can be selected from the group consisting of 530-537, 569-570, 686-691, 943-947, 1002-1025, 1052-1077, 1232-1247, or 1298-1300 as numbered in the above Cas9 reference sequence, or a corresponding amino acid residue in another Cas9 polypeptide. The flexible loop portions can be selected from the group consisting of: 1-529, 538-568, 580-685, 692-942, 948-1001, 1026-1051, 1078-1231, or 1248-1297 as numbered in the above Cas9 reference sequence, or a corresponding amino acid residue in another Cas9 polypeptide.

[0400] A heterologous polypeptide (e.g., adenine deaminase) can be inserted into a Cas9 polypeptide region corresponding to amino acid residues: 1017-1069, 1242-1247, 1052-1056, 1060-1077, 1002-1003, 943-947, 530-537, 568-579, 686-691, 1242-1247, 1298-1300, 1066-1077, 1052-1056, or 1060-1077 as numbered in the above Cas9 reference sequence, or a corresponding amino acid residue in another Cas9 polypeptide.

[0401] A heterologous polypeptide (e.g., adenine deaminase) can be inserted in place of a deleted region of a Cas9 polypeptide. The deleted region can correspond to an N-terminal or C-terminal portion of the Cas9 polypeptide. Exemplary internal fusions base editors are provided in Table 4A below:

TABLE 4A
Insertion loci in Cas9 proteins

| BE ID | Modification | Other ID |
|---|---|---|
| IBE001 | Cas9 TadA ins 1015 | ISLAY01 |
| IBE002 | Cas9 TadA ins 1022 | ISLAY02 |
| IBE003 | Cas9 TadA ins 1029 | ISLAY03 |
| IBE004 | Cas9 TadA ins 1040 | ISLAY04 |
| IBE005 | Cas9 TadA ins 1068 | ISLAY05 |
| IBE006 | Cas9 TadA ins 1247 | ISLAY06 |
| IBE007 | Cas9 TadA ins 1054 | ISLAY07 |
| IBE008 | Cas9 TadA ins 1026 | ISLAY08 |
| IBE009 | Cas9 TadA ins 768 | ISLAY09 |
| IBE020 | delta HNH TadA 792 | ISLAY20 |
| IBE021 | N-term fusion single TadA helix truncated 165-end | ISLAY21 |
| IBE029 | TadA-Circular Permutant116 ins1067 | ISLAY29 |
| IBE031 | TadA- Circular Permutant 136 ins1248 | ISLAY31 |
| IBE032 | TadA- Circular Permutant 136ins 1052 | ISLAY32 |
| IBE035 | delta 792-872 TadA ins | ISLAY35 |
| IBE036 | delta 792-906 TadA ins | ISLAY36 |
| IBE043 | TadA-Circular Permutant 65 ins1246 | ISLAY43 |
| IBE044 | TadA ins C-term truncate2 791 | ISLAY44 |

[0402] A heterologous polypeptide (e.g., deaminase) can be inserted within a structural or functional domain of a Cas9 polypeptide. A heterologous polypeptide (e.g., deaminase) can be inserted between two structural or functional domains of a Cas9 polypeptide. A heterologous polypeptide (e.g., deaminase) can be inserted in place of a structural or functional domain of a Cas9 polypeptide, for example, after deleting the domain from the Cas9 polypeptide. The structural or functional domains of a Cas9 polypeptide can include, for example, RuvC I, RuvC II, RuvC III, Rec1, Rec2, PI, or HNH.

[0403] A fusion protein may comprise a linker between the deaminase and the napDNAbp polypeptide. The linker can be a peptide or a non-peptide linker. For example, the linker can be an XTEN, (GGGS)n (SEQ ID NO: 246), SGGSSGGS (SEQ ID NO: 330), (GGGGS)n (SEQ ID NO: 247), (G)n, (EAAAK)n (SEQ ID NO: 248), (GGS)n, SGSETPGTSESATPES (SEQ ID NO: 249). In some embodiments, the fusion protein comprises a linker between the N-terminal Cas9 fragment and the deaminase. In some embodiments, the fusion protein comprises a linker between the C-terminal Cas9 fragment and the deaminase. In some embodiments, the N-terminal and C-terminal fragments of napDNAbp are connected to the deaminase with a linker. In some embodiments, the N-terminal and C-terminal fragments are joined to the deaminase domain without a linker. In some embodiments, the fusion protein comprises a linker between the N-terminal Cas9 fragment and the deaminase but does not comprise a linker between the C-terminal Cas9 fragment and the deaminase. In some embodiments, the fusion protein comprises a linker between the C-terminal Cas9 fragment and the deaminase but does not comprise a linker between the N-terminal Cas9 fragment and the deaminase.

[0404] In some embodiments, the napDNAbp in the fusion protein or complex is a Cas12 polypeptide, e.g., Cas12b/C2c1, or a functional fragment thereof capable of associating with a nucleic acid (e.g., a gRNA) that guides the Cas 12 to a specific nucleic acid sequence. The Cas12 polypeptide can be a variant Cas12 polypeptide. In other embodiments, the N- or C-terminal fragments of the Cas 12 polypeptide comprise a nucleic acid programmable DNA binding domain or a RuvC domain. In other embodiments, the fusion protein contains a linker between the Cas12 polypeptide and the catalytic domain. In other embodiments, the amino acid sequence of the linker is GGSGGS (SEQ ID NO: 250) or GSSGSETPGTSESATPESSG (SEQ ID NO: 251). In other embodiments, the linker is a rigid linker. In other embodiments of the above aspects, the linker is encoded by GGAGGCTCTGGAGGAAGC (SEQ ID NO: 252) or

(SEQ ID NO: 253)
GGCTCTTCTGGATCTGAAACACCTGGCACAAGCGAGAGCGCCACCCCTG
AGAGCTCTGGC.

[0405] In other embodiments, the fusion protein or complex contains a nuclear localization signal (e.g., a bipartite nuclear localization signal). In other embodiments, the amino acid sequence of the nuclear localization signal is MAPKKKRKVGIHGVPAA (SEQ ID NO: 261). In other embodiments of the above aspects, the nuclear localization signal is encoded by the following sequence:

[0406] ATGGCCCCAAAGAAGAAGCGGAAGGTCGGTATCCACGGAGTCCCAGCAGCC (SEQ ID NO: 262). In other embodiments, the Cas12b polypeptide contains a mutation that silences the catalytic activity of a RuvC domain. In other embodiments, the Cas12b polypeptide contains D574A, D829A and/or D952A mutations.

[0407] In some embodiments, the fusion protein or complex comprises a napDNAbp domain (e.g., Cas12-derived domain) with an internally fused nucleobase editing domain (e.g., all or a portion (e.g., a functional portion) of a deaminase domain, e.g., an adenosine deaminase domain). In some embodiments, the napDNAbp is a Cas12b. In some embodiments, the base editor comprises a BhCas12b domain with an internally fused TadA*8 domain inserted at the loci provided in Table 4B below.

TABLE 4B
Insertion loci in Cas12b proteins

| | Insertion site | Inserted between aa |
|---|---|---|
| BhCas12b | | |
| position 1 | 153 | PS |
| position 2 | 255 | KE |
| position 3 | 306 | DE |
| position 4 | 980 | DG |
| position 5 | 1019 | KL |
| position 6 | 534 | FP |
| position 7 | 604 | KG |
| position 8 | 344 | HF |
| BvCas12b | | |
| position 1 | 147 | PD |
| position 2 | 248 | GG |
| position 3 | 299 | PE |
| position 4 | 991 | GE |
| position 5 | 1031 | KM |
| AaCas12b | | |
| position 1 | 157 | PG |
| position 2 | 258 | VG |
| position 3 | 310 | DP |
| position 4 | 1008 | GE |
| position 5 | 1044 | GK |

[0408] In some embodiments, the base editing system described herein is an ABE with TadA inserted into a Cas9. Polypeptide sequences of relevant ABEs with TadA inserted into a Cas9 are provided in the attached Sequence Listing as SEQ ID NOs: 263-308.

[0409] Exemplary, yet nonlimiting, fusion proteins are described in International PCT Application Nos. PCT/US2020/016285 and U.S. Provisional Application Nos. 62/852,228 and 62/852,224, the contents of which are incorporated by reference herein in their entireties.

### A to G Editing

[0410] In some embodiments, a base editor described herein comprises an adenosine deaminase domain. Such an adenosine deaminase domain of a base editor can facilitate the editing of an adenine (A) nucleobase to a guanine (G) nucleobase by deaminating the A to form inosine (I), which exhibits base pairing properties of G. In some embodiments, an A-to-G base editor further comprises an inhibitor of inosine base excision repair, for example, a uracil glycosylase inhibitor (UGI) domain or a catalytically inactive inosine specific nuclease. Without wishing to be bound by any particular theory, the UGI domain or catalytically inactive inosine specific nuclease can inhibit or prevent base excision repair of a deaminated adenosine residue (e.g., inosine), which can improve the activity or efficiency of the base editor.

[0411] A base editor comprising an adenosine deaminase can act on any polynucleotide, including DNA, RNA and DNA-RNA hybrids. In an embodiment an adenosine deaminase domain of a base editor comprises all or a portion (e.g., a functional portion) of an ADAT comprising one or more mutations which permit the ADAT to deaminate a target A in DNA. For example, the base editor may comprise all or a portion (e.g., a functional portion) of an ADAT from Escherichia coli (EcTadA) comprising one or more of the following mutations: D108N, A106V, D147Y, E155V, L84F, H123Y, I156F, or a corresponding mutation in another adenosine deaminase. Exemplary ADAT homolog polypeptide sequences are provided in the Sequence Listing as SEQ ID NOs: 1 and 309-315.

[0412] The adenosine deaminase can be derived from any suitable organism (e.g., E. coli). In some embodiments, the adenosine deaminase is from Escherichia coli, Staphylococcus aureus, Salmonella typhi, Shewanella putrefaciens, Haemophilus influenzae, Caulobacter crescentus, or Bacillus subtilis. In some embodiments, the adenine deaminase is a naturally-occurring adenosine deaminase that includes one or more mutations corresponding to any of the mutations provided herein (e.g., mutations in ecTadA). The corresponding residue in any homologous protein can be identified by e.g., sequence alignment and determination of homologous residues. The mutations in any naturally-occurring adenosine deaminase (e.g., having homology to ecTadA) that correspond to any of the mutations described herein (e.g., any of the mutations identified in ecTadA) can be generated accordingly.

[0413] In some embodiments, the adenosine deaminase comprises an amino acid sequence that is at least 60%, at least 65%, at least 70%, at least 75%, at least 80%, at least 85%, at least 90%, at least 95%, at least 96%, at least 97%, at least 98%, at least 99%, or at least 99.5% identical to any one of the amino acid sequences set forth in any of the adenosine deaminases provided herein. It should be appreciated that adenosine deaminases provided herein may include one or more mutations (e.g., any of the mutations provided herein). The disclosure provides any deaminase domains with a certain percent identify plus any of the mutations or combinations thereof described herein. In some embodiments, the adenosine deaminase comprises an amino acid sequence that has 1, 2, 3, 4, 5, 6, 7, 8, 9, 10, 11, 12, 13, 14, 15, 16, 17, 18, 19, 20, 21, 22, 21, 24, 25, 26, 27, 28, 29, 30, 31, 32, 33, 34, 35, 36, 37, 38, 39, 40, 41, 42, 43, 44, 45, 46, 47, 48, 49, 50, or more mutations compared to a reference sequence, or any of the adenosine deaminases provided herein.

[0414] It should be appreciated that any of the mutations provided herein (e.g., based on a TadA reference sequence, such as TadA*7.10 (SEQ ID NO: 1)) can be introduced into other adenosine deaminases, such as E. coli TadA (ecTadA), S. aureus TadA (saTadA), or other adenosine deaminases (e.g., bacterial adenosine deaminases). In some embodiments, the TadA reference sequence is TadA*7.10 (SEQ ID NO: 1). It would be apparent to the skilled artisan that additional deaminases may similarly be aligned to identify homologous amino acid residues that can be mutated as provided herein. Thus, any of the mutations identified in a TadA reference sequence can be made in other adenosine deaminases (e.g., ecTada) that have homologous amino acid residues. It should also be appreciated that any of the mutations provided herein can be made individually or in any combination in a TadA reference sequence or another adenosine deaminase.

[0415] In some embodiments, the adenosine deaminase comprises an alteration or set of alterations selected from those listed in Tables 5A-5E below:

TABLE 5A
Adenosine Deaminase Variants. Residue positions in the E. coli TadA variant (TadA*) are indicated.

| | 23 | 26 | 36 | 37 | 48 | 49 | 51 | 72 | 84 | 87 | 106 | 108 | 123 | 125 | 142 | 146 | 147 | 152 | 155 | 156 | 157 | 161 |
|---|---|---|---|---|---|---|---|---|---|---|---|---|---|---|---|---|---|---|---|---|---|---|
| TadA*0.1 | W | R | H | N | P | | R | N | L | S | A | D | H | G | A | S | D | R | E | I | K | K |
| TadA*0.2 | W | R | H | N | P | | R | N | L | S | A | D | H | G | A | S | D | R | E | I | K | K |
| TadA*1.1 | W | R | H | N | P | | R | N | L | S | A | N | H | G | A | S | D | R | E | I | K | K |
| TadA*1.2 | W | R | H | N | P | | R | N | L | S | V | N | H | G | A | S | D | R | E | I | K | K |
| TadA*2.1 | W | R | H | N | P | | R | N | L | S | V | N | H | G | A | S | Y | R | V | I | K | K |
| TadA*2.2 | W | R | H | N | P | | R | N | L | S | V | N | H | G | A | S | Y | R | V | I | K | K |
| TadA*2.3 | W | R | H | N | P | | R | N | L | S | V | N | H | G | A | S | Y | R | V | I | K | K |
| TadA*2.4 | W | R | H | N | P | | R | N | L | S | V | N | H | G | A | S | Y | R | V | I | K | K |
| TadA*2.5 | W | R | H | N | P | | R | N | L | S | V | N | H | G | A | S | Y | R | V | I | K | K |
| TadA*2.6 | W | R | H | N | P | | R | N | L | S | V | N | H | G | A | S | Y | R | V | I | K | K |
| TadA*2.7 | W | R | H | N | P | | R | N | L | S | V | N | H | G | A | S | Y | R | V | I | K | K |
| TadA*2.8 | W | R | H | N | P | | R | N | L | S | V | N | H | G | A | S | Y | R | V | I | K | K |
| TadA*2.9 | W | R | H | N | P | | R | N | L | S | V | N | H | G | A | S | Y | R | V | I | K | K |
| TadA*2.10 | W | R | H | N | P | | R | N | L | S | V | N | H | G | A | S | Y | R | V | I | K | K |
| TadA*2.11 | W | R | H | N | P | | R | N | L | S | V | N | H | G | A | S | Y | R | V | I | K | K |
| TadA*2.12 | W | R | H | N | P | | R | N | L | S | V | N | H | G | A | S | Y | R | V | I | K | K |
| TadA*3.1 | W | R | H | N | P | | R | N | F | S | V | N | Y | G | A | S | Y | R | V | F | K | K |
| TadA*3.2 | W | R | H | N | P | | R | N | F | S | V | N | Y | G | A | S | Y | R | V | F | K | K |
| TadA*3.3 | W | R | H | N | P | | R | N | F | S | V | N | Y | G | A | S | Y | R | V | F | K | K |
| TadA*3.4 | W | R | H | N | P | | R | N | F | S | V | N | Y | G | A | S | Y | R | V | F | K | K |
| TadA*3.5 | W | R | H | N | P | | R | N | F | S | V | N | Y | G | A | S | Y | R | V | F | K | K |
| TadA*3.6 | W | R | H | N | P | | R | N | F | S | V | N | Y | G | A | S | Y | R | V | F | K | K |
| TadA*3.7 | W | R | H | N | P | | R | N | F | S | V | N | Y | G | A | S | Y | R | V | F | K | K |
| TadA*3.8 | W | R | H | N | P | | R | N | F | S | V | N | Y | G | A | S | Y | R | V | F | K | K |
| TadA*4.1 | W | R | H | N | P | | R | N | L | S | V | N | H | G | N | S | Y | R | V | I | K | K |
| TadA*4.2 | W | G | H | N | P | | R | N | L | S | V | N | H | G | N | S | Y | R | V | I | K | K |
| TadA*4.3 | W | R | H | N | P | | R | N | F | S | V | N | Y | G | N | S | Y | R | V | F | K | K |
| TadA*5.1 | W | R | L | N | P | | L | N | F | S | V | N | Y | G | A | C | Y | R | V | F | N | K |
| TadA*5.2 | W | R | H | S | P | | R | N | F | S | V | N | Y | G | A | S | Y | R | V | F | K | T |
| TadA*5.3 | W | R | L | N | P | | L | N | I | S | V | N | Y | G | A | C | Y | R | V | F | N | K |
| TadA*5.4 | W | R | H | S | P | | R | N | F | S | V | N | Y | G | A | S | Y | R | V | F | K | T |
| TadA*5.5 | W | R | L | N | P | | L | N | F | S | V | N | Y | G | A | C | Y | R | V | F | N | K |
| TadA*5.6 | W | R | L | N | P | | L | N | F | S | V | N | Y | G | A | C | Y | R | V | F | N | K |
| TadA*5.7 | W | R | L | N | P | | L | N | F | S | V | N | Y | G | A | C | Y | R | V | F | N | K |
| TadA*5.8 | W | R | L | N | P | | L | N | F | S | V | N | Y | G | A | C | Y | R | V | F | N | K |
| TadA*5.9 | W | R | L | N | P | | L | N | F | S | V | N | Y | G | A | C | Y | R | V | F | N | K |
| TadA*5.10 | W | R | L | N | P | | L | N | F | S | V | N | Y | G | A | C | Y | R | V | F | N | K |
| TadA*5.11 | W | R | L | N | P | | L | N | F | S | V | N | Y | G | A | C | Y | R | V | F | N | K |
| TadA*5.12 | W | R | L | N | P | | L | N | F | S | V | N | Y | G | A | C | Y | R | V | F | N | K |
| TadA*5.13 | W | R | H | N | P | | L | D | F | S | V | N | Y | A | A | S | Y | R | V | F | K | K |
| TadA*5.14 | W | R | H | N | S | | L | N | F | C | V | N | Y | G | A | S | Y | R | V | F | K | K |
| TadA*6.1 | W | R | H | N | S | | L | N | F | S | V | N | Y | G | N | S | Y | R | V | F | K | K |
| TadA*6.2 | W | R | H | N | T | V | L | N | F | S | V | N | Y | G | N | S | Y | R | V | F | N | K |
| TadA*6.3 | W | R | L | N | S | | L | N | F | S | V | N | Y | G | A | C | Y | R | V | F | N | K |
| TadA*6.4 | W | R | L | N | S | | L | N | F | S | V | N | Y | G | N | C | Y | R | V | F | N | K |
| TadA*6.5 | W | R | L | N | T | V | L | N | F | S | V | N | Y | G | A | C | Y | R | V | F | N | K |
| TadA*6.6 | W | R | L | N | T | V | L | N | F | S | V | N | Y | G | N | C | Y | R | V | F | N | K |
| TadA*7.1 | W | R | L | N | A | | L | N | F | S | V | N | Y | G | A | C | Y | R | V | F | N | K |
| TadA*7.2 | W | R | L | N | A | | L | N | F | S | V | N | Y | G | N | C | Y | R | V | F | N | K |
| TadA*7.3 | L | R | L | N | A | | L | N | F | S | V | N | Y | G | A | C | Y | R | V | F | N | K |
| TadA*7.4 | R | R | L | N | A | | L | N | F | S | V | N | Y | G | A | C | Y | R | V | F | N | K |
| TadA*7.5 | W | R | L | N | A | | L | N | F | S | V | N | Y | G | A | C | Y | H | V | F | N | K |
| TadA*7.6 | W | R | L | N | A | | I | N | I | S | V | N | Y | G | A | C | Y | P | V | F | N | K |
| TadA*7.7 | L | R | L | N | A | | L | N | F | S | V | N | Y | G | A | C | Y | P | V | F | N | K |
| TadA*7.8 | L | R | L | N | A | | L | N | F | S | V | N | Y | G | N | C | Y | R | V | F | N | K |
| TadA*7.9 | L | R | L | N | A | | L | N | F | S | V | N | Y | G | N | C | Y | P | V | F | N | K |
| TadA*7.10 | R | R | L | N | A | | L | N | F | S | V | N | Y | G | A | C | Y | P | V | F | N | K |

TABLE 5B
TadA*8 Adenosine Deaminase Variants. Residue positions in the E. coli TadA
variant (TadA*) are indicated. Alterations are referenced to TadA*7.10 (first row).

| | 2 | 3 | 4 | 5 | 7 | 8 | 8 | 10 | 10 | 12 | 14 | 14 | 15 | 15 | 15 | 15 | 15 | |
|---|---|---|---|---|---|---|---|---|---|---|---|---|---|---|---|---|---|---|
| | 3 | 6 | 8 | 1 | 6 | 2 | 4 | 6 | 8 | 3 | 6 | 7 | 2 | 4 | 5 | 6 | 7 | 166 |
| TadA*7.10 | R | L | A | L | I | V | F | V | N | Y | C | Y | P | Q | V | F | N | T |
| TadA*8.1 | | | | | | | | | | | | T | | | | | | |
| TadA*8.2 | | | | | | | | | | | | R | | | | | | |
| TadA*8.3 | | | | | | | | | | | | | | S | | | | |
| TadA*8.4 | | | | | | | | | | H | | | | | | | | |
| TadA*8.5 | | | | | | S | | | | | | | | | | | | |
| TadA*8.6 | | | | | | | | | | | | | | | | | | R |
| TadA*8.7 | | | | | | | | | | | | | | R | | | | |
| TadA*8.8 | | | | | | | | | | H | | R | | R | | | | |
| TadA*8.9 | | | | | Y | | | | | | | R | | R | | | | |
| TadA*8.10 | | | | | | | | | | | | R | | R | | | | R |
| TadA*8.11 | | | | | | | | | | | | T | | R | | | | |
| TadA*8.12 | | | | | | | | | | | | T | | S | | | | |
| TadA*8.13 | | | | | Y | | | | | H | | R | | R | | | | |
| TadA*8.14 | | | | | Y | S | | | | | | | | | | | | |
| TadA*8.15 | | | | | | S | | | | | | R | | | | | | |
| TadA*8.16 | | | | | | S | | | | H | | R | | | | | | |
| TadA*8.17 | | | | | | S | | | | | | | | R | | | | |
| TadA*8.18 | | | | | | S | | | | H | | | | R | | | | |
| TadA*8.19 | | | | | | S | | | | H | | R | | R | | | | |
| TadA*8.20 | | | | | Y | S | | | | H | | R | | R | | | | |
| TadA*8.21 | | | | | | | | | | | | R | | S | | | | |
| TadA*8.22 | | | | | | S | | | | | | | | S | | | | |
| TadA*8.23 | | | | | | S | | | | H | | | | | | | | |
| TadA*8.24 | | | | | | S | | | | H | | T | | | | | | |

TABLE 5C
TadA*9 Adenosine Deaminase Variants. Alterations are referenced
to TadA*7.10. Additional details of TadA*9 adenosine
deaminases are described in International PCT Application
No. PCT/US2020/049975, which is incorporated herein by
reference in its entirety for all purposes.

| TadA*9 | |
|---|---|
| Description | Alterations |
| TadA*9.1 | E25F, V82S, Y123H, T133K, Y147R, Q154R |
| TadA*9.2 | E25F, V82S, Y123H, Y147R, Q154R |
| TadA*9.3 | V82S, Y123H, P124W, Y147R, Q154R |
| TadA*9.4 | L51W, V82S, Y123H, C146R, Y147R, Q154R |
| TadA*9.5 | P54C, V82S, Y123H, Y147R, Q154R |
| TadA*9.6 | Y73S, V82S, Y123H, Y147R, Q154R |
| TadA*9.7 | N38G, V82T, Y123H, Y147R, Q154R |
| TadA*9.8 | R23H, V82S, Y123H, Y147R, Q154R |
| TadA*9.9 | R21N, V82S, Y123H, Y147R, Q154R |
| TadA*9.10 | V82S, Y123H, Y147R, Q154R, A158K |
| TadA*9.11 | N72K, V82S, Y123H, D139L, Y147R, Q154R, |
| TadA*9.12 | E25F, V82S, Y123H, D139M, Y147R, Q154R |
| TadA*9.13 | M70V, V82S, M94V, Y123H, Y147R, Q154R |
| TadA*9.14 | Q71M, V82S, Y123H, Y147R, Q154R |
| TadA*9.15 | E25F, V82S, Y123H, T133K, Y147R, Q154R |
| TadA*9.16 | E25F, V82S, Y123H, Y147R, Q154R |
| TadA*9.17 | V82S, Y123H, P124W, Y147R, Q154R |
| TadA*9.18 | L51W, V82S, Y123H, C146R, Y147R, Q154R |
| TadA*9.19 | P54C, V82S, Y123H, Y147R, Q154R |
| TadA*9.2 | Y73S, V82S, Y123H, Y147R, Q154R |
| TadA*9.21 | N38G, V82T, Y123H, Y147R, Q154R |
| TadA*9.22 | R23H, V82S, Y123H, Y147R, Q154R |
| TadA*9.23 | R21N, V82S, Y123H, Y147R, Q154R |
| TadA*9.24 | V82S, Y123H, Y147R, Q154R, A158K |
| TadA*9.25 | N72K, V82S, Y123H, D139L, Y147R, Q154R, |
| TadA*9.26 | E25F, V82S, Y123H, D139M, Y147R, Q154R |
| TadA*9.27 | M70V, V82S, M94V, Y123H, Y147R, Q154R |
| TadA*9.28 | Q71M, V82S, Y123H, Y147R, Q154R |
| TadA*9.29 | E25F_I76Y_V82S_Y123H_Y147R_Q154R |
| TadA*9.30 | I76Y_V82T_Y123H_Y147R_Q154R |
| TadA*9.31 | N38G_I76Y_V82S_Y123H_Y147R_Q154R |
| TadA*9.32 | N38G_I76Y_V82T_Y123H_Y147R_Q154R |
| TadA*9.33 | R23H_I76Y_V82S_Y123H_Y147R_Q154R |
| TadA*9.34 | P54C_I76Y_V82S_Y123H_Y147R_Q154R |
| TadA*9.35 | R21N_I76Y_V82S_Y123H_Y147R_Q154R |
| TadA*9.36 | I76Y_V82S_Y123H_D138M_Y147R_Q154R |
| TadA*9.37 | Y72S_I76Y_V82S_Y123H_Y147R_Q154R |
| TadA*9.38 | E25F_I76Y_V82S_Y123H_Y147R_Q154R |
| TadA*9.39 | I76Y_V82T_Y123H_Y147R_Q154R |
| TadA*9.40 | N38G_I76Y_V82S_Y123H_Y147R_Q154R |
| TadA*9.41 | N38G_I76Y_V82T_Y123H_Y147R_Q154R |
| TadA*9.42 | R23H_I76Y_V82S_Y123H_Y147R_Q154R |
| TadA*9.43 | P54C_I76Y_V82S_Y123H_Y147R_Q154R |
| TadA*9.44 | R21N_I76Y_V82S_Y123H_Y147R_Q154R |
| TadA*9.45 | I76Y_V82S_Y123H_D138M_Y147R_Q154R |
| TadA*9.46 | Y72S_I76Y_V82S_Y123H_Y147R_Q154R |
| TadA*9.47 | N72K_V82S, Y123H, Y147R, Q154R |
| TadA*9.48 | Q71M_V82S, Y123H, Y147R, Q154R |
| TadA*9.49 | M70V, V82S, M94V, Y123H, Y147R, Q154R |
| TadA*9.50 | V82S, Y123H, T133K, Y147R, Q154R |
| TadA*9.51 | V82S, Y123H, T133K, Y147R, Q154R, A158K |
| TadA*9.52 | M70V, Q71M, N72K, V82S, Y123H, Y147R, Q154R |
| TadA*9.53 | N72K_V82S, Y123H, Y147R, Q154R |
| TadA*9.54 | Q71M_V82S, Y123H, Y147R, Q154R |
| TadA*9.55 | M70V, V82S, M94V, Y123H, Y147R, Q154R |
| TadA*9.56 | V82S, Y123H, T133K, Y147R, Q154R |
| TadA*9.57 | V82S, Y123H, T133K, Y147R, Q154R, A158K |
| TadA*9.58 | M70V, Q71M, N72K, V82S, Y123H, Y147R, Q154R |

[0416] In some embodiments, the adenosine deaminase comprises a TadA*8.20 adenosine deaminase variant further comprising an F149Y amino acid alteration. In some embodiments, the adenosine deaminase comprises a TadA*8.20 adenosine deaminase variant further comprising the amino acid alterations R147D, F149Y, T166I, and D167N (TadA*8.10+). In some embodiments, the adenosine deaminase comprises a TadA*8.20 adenosine deaminase variant further comprising the amino acid alterations S82T and F149Y (TadA*9v1). In some embodiments, the adenosine deaminase comprises a TadA*8.20 adenosine deaminase variant further comprising the amino acid alterations Y147D, F149Y, T166I, D167N and S82T (TadA*9v2).

[0417] In some embodiments, the adenosine deaminase comprises one or more of MII, MIS, S2A, S2E, S2H, S2R, S2L, E3L, V4D, V4E, V4M, V4K, V4S, V4T, V4A, E5K, F6S, F6G, F6H, F6Y, F6I, F6E, S7K, H8E, H8Y, H8H, H8Q, H8E, H8G, H8S, E9Y, E9K, E9V, E9E, Y10F, Y10W, Y10Y, M12S, M12L, M12R, M12W, R13H, R13I, R13Y, R13R, R13G, R13S, H14N, A15D, A15V, A15L, A15H, T17T, T17A, T17W, T17L, T17F, T17R, T17S, L18A, L18E, L18N, L18L, L18S, A19N, A19H, A19K, A19A, A19D, A19G, A19M, R21N, K20K, K20A, K20R, K20E, K20G, K20C, K20Q R21A, R21R, R21N, R21Y, R21C G22P, A22W, A22R, W23D, R23H, W23G, W23Q, W23L, W23R, W23H W23D W23M, W23W, W23I, D24E, D24G, D24W, D24D, D24R, E25F, E25M, E25D, E25A, E25G, E25R, E25E, E25H E25V, E25S, E25Y, R26D, R26E, R26G, R26N, R26Q, R26C, R26L, R26K, R26W, R26C, R26P, R26R, R26A, R26H, E27E, E27Q, E27H, E27C, E27G, E27K, E27S, E27P, E27R, E27L, E27V, E27D, V28V, V28A, V28C, V28G, V28P, V28S, V28T, P29V, P29P, P29A, P29G, P29K, P29L, V30V, V30I, V30L, V30F, V30G, V30A, V30M, L34S, L34V, L34L, L34M, L34W, L34G, H36E, H36V, L36H, H36L, H36N, N37N, N37H, N37R, N37T, N37S, N38G, N38R, N38N, N38E, V40I, W45A, W45W, W45R, W45L, W45N, N46N, N46M, N46P, N46G, N46L, N46R, N46V, R46W, R46F, R46Q, R46M, R47A, R47Q, R47F, R47K, R47P, R47W, R47M, R47R, R47G, R47S, R47V, R47H, P48T, P48L, P48A, P48I, P48S, P48R, P48K, P48D, P48E, P48H, P48G, P48P, P48N, 149G, I49H, I49V, I49F, I49H, I49I, I49M, I49N, I49K, I49Q, I49T, G50L, G50S, G50R, G50G, R51H, R51L, R51N, L51W, R51Y, R51G, R51V, R51R, H52D, H52Y, H52I, H52H, D53D, D53E, D53G, D53P, P54C, P54T, P54P, P54E, A55H, T55A, T55I, T55V, T55G, T55T, A56A, A56H, A56W, A56E, A56S, H57P, H57A, H57H, H57N, A58G, A58E, A58A, A58R, E59A, E59G, E59I, E59Q, E59W, E59E, E59T, E59H, E59P, M61A, M61I, M61L, M61V, M61P, M61G, M61I, L63S, L63V, L63T, L63R, L63H, L63A, R64A, R64Q, R64R, R64D, Q65V, Q65H, Q65G, Q65P, Q65F, Q65Q, Q65R, G66V, G66E, G66T, G66G, G66C, G67G, G67W, G67I, G67A, G67D, G67L, G67V, L68Q, L68M, L68V, L68H, L68L, L68G, V69A, V69M, V69V, M70V, M70L, E70A, M70A, M70M, M70E, M70T, M70v, Q71M, Q71N, Q71L, Q71R, Q71Q, Q71I, N72A, N72K, N72S, N72D, N72Y, N72N, N72H, N72G, N72M, Y73G, Y731, Y73K, Y73R, Y73S, Y73Y, Y73H, Y73A, R74A, R74Q, R74G, R74K, R74L, R74N, R74G, R74K, R74R, I76H, I76R, I76W, I76Y, I76V, I76Q, I76L, I76D, I76F, I76I, I76N, I76T, I76Y, D77G, D77D, D77A, D77Q, A78Y, A78T, A78G, A78A, A78I, T79M, T79R, T79L, T79T, L80M, L80Y, L80I, L80V, L80L, Y81D, Y81V, Y81Y, Y81M, V82A, V82S, V82G, V82T, V82V, V82Q, V82Y, T83L, T83F, T83T, T83N, L84E, L84F, L84Y, L84I, L84L, L84M, L84A, L84T, L84S, E85K, E85G, E85P, E85S, E85E, E85F, E85V, E85R, P86T, P86C, P86P, P86L, P86N, P86K, P86H, C87M, C87I, C87S, C87N, C87P, S87C, S87L, S87V, V88A, V88M, V88V, V88T, V88E, V88D, V88S, C90S, C90P, C90A, C90T, C90M, A91A, A91G, A91S, A91V, A91T, A91C, A91L, G92T, G92M, G92A, G92Y, G92G, A93I, A93C, A93M, A93V, A93A, M94M, M94T, M94A, M94V, M94L, M94I, M94H, I95S, I95G, I95L, I95H, I95V, H96A, H96L, H96R, H96S, H96H, H96N, H96E, S97C, S97G, S97I, S97M, S97R, S97S, S97P, R98K, R98I, R98N, R98Q, R98G, R98H, R98C, R98L, R98R, G100R, G100V, G100K, G100A, G100S, G100M, G100I, R101V, R101R, R101S, R101C, V102A, V102F, V102I, V102V, D103A, V103A, V103G, V103F, V103V, F104G, D104N, F104V, F104I, F104L, F104A, F104F, F104R, G105V, G105W, G105G, G105M, G105A, A106T, V106Q, V106F, V106W, V106M, A106A, A106Q, A106F, A106G, A106W, A106M, A106V, A106R, A106L, A106S, A106B, A106I, R107C, R107G, R107P, R107K, R107A, R107N, R107W, R107H, R107S, R107R, R107F, D108N, D108F, D108G, D108V, D108A, D108Y, D108H, D108I, D108K, D108L, D108M, D108Q, N108Q, N108F, N108W, N108M, N108K, D108K, D108F, D108M, D108Q, D108R, D108W, D108S, D108E, D108T, D108R, D108D, A109H, A109K, A109R, A109S, A109T, A109V, A109A, A109D, K110G, K110H, K110I, K110R, K110T, K110K, K110A, K1101, T111A, T111G, T111H, T111R, T111T, T111K, G112A, G112G, G112H, G112T, G112R, A113N, A114G, A114H, A114V, A114C, A114S, A114A, G115S, G115G, G115M, G115L, G115A, G115F, L117M, L117L, L117W, L117A, L117S, L117N, L117V, M118D, M118G, M118K, M118N, M118V, M118M, M118L, M118R, D119L, D119N, D119S, D119V, D119D, V120H, V120L, V120V, V120T, V120A, V120E, V120G, V120D, L121D, L121M, L121N, L121K, L121L, H122H, H122N, H122P, H122R, H122S, H122Y, H122G, H122T, H122L, H123C, H123G, H123P, H123V, H123Y, Y123H, H123Y, H123H, P124P, P124H, P124A, P124Y, P124D, P124G, P124I, P124L, P124W, G125H, G125I, G125A, G125M, G125K, G125G, G125P, M126D, M126H, M126K, M126I, M126N, M1260, M126S, M126Y, M126M, M126G, N127H, N127S, N127D, N127K, N127R, N127N, N127I, N127P, N127M, H128R, H128N, H128L, H128H, R129H, R129Q, R129V, R129I, R129E, R129V, R129R, R129M, R129P, V130R, V130V, V130E, V130D, E131E, E131I, E131V, E131K, I132I, I132F, I132T, I132L, I132V, I132E, T133V, T133E, T133G, T133K, T133T, T133A, T133H, T133F, T133I, E134A, E134E, E134G, E134I, E134H, E134K, E134T, G135G, G135V, G135I, G135P, G135E, 1136G, I136L, 1136T, 1136I, 1137A, 1137D, 1137E, L137M, 1137S, L137L, L1371, A138D, A138E, A138G, S138A, A138N, A138S, A138T, A138V, A138Y, A138A, A138M, A138L, D139E, D139I, D139C, D139L, D139M, D139D, D139G, D139H, D139A, E140A, E140C, E140L, E140R, E140K, E140E, E140D, C141S, C141A, C141C, C141V, C141E, A142N, A142D, A142G, A142A, A142L, A142S, A142T, A142N, A142S, A142V, A142E, A142C, A143D, A143E, A143G, A143D, A143G, A143E, A143L, A143W, A143M, A143S, A143Q, A143R, A143A, A143I, L144S, L144L, L144T, L144A, L145A, L145F, L145G, L145D, L145L, L145C, L145E, L145s, C146R, S146A, S146C, S146D, S146F, S146R, S146T, S146D, S146G, S146S, S146L, D147D, D147L, D147F, D147G, D147Y, Y147T, Y147R, Y147D, D147R, D147Y, D147A, D147T, D147H, D147F, D147U, D147V, D1471, D147C, F148L, F148F, F148R, F148Y, F148A, F148T, F149C, F149M, F149R, F149Y, F149N, F149F, F149A, F149T, F149V R150R, R150M, R150D, R150F, M151F, M151P, M151R, M151V, M151M, M151E, R152C, R152F, R152H, R152P, R152R, R152P, R152Q, R152M, R1520, R153C, R153Q, R153R, R153V, R153E, R153A, R153P, Q154E, Q154H, Q154M, Q154R, Q154L, Q154S, Q154V, Q154Q, Q154F, Q154I, Q154A, Q154K, E155F, E155G, E155I, E155K, E155P, E155V, E155D, E155E, E155L, E155Q, I156V, I156A, I156I, I156L, I156F, I156D, I156K, I156N, I156R, I156Y, E157A, E157F, E157I, E157P, E157T, E157V, N157K, K157N, K157V, K157P, K157I, K157F, K157F, K157T, K157A, K157S, K157R, A158Q, A158K, A158V, A158A, A158D, A158S, A158T, A158N, Q159S, Q159Q, Q159A, Q159F, Q159K, Q159L, Q159N, K160A, K160S, K160E, K160K, K160N, K160F, K160Q, K161T, K161K, K161R, K161I, K161A, K16IN, K161Q, K161S, K161T, A162D, A162Q, R162H, R162P, A162S, A162A, A162N, A162M, A162K, Q163G, Q163S, Q163Q, Q163A, Q163H, Q163N, Q163R, S164F, S164S, S164Q, S164I, S164R, S164Y, S165S, S165P, S165Q, S165A, S165D, S165I, S165T, S165Y, T166T, T166Q, T166E, T166S, T166D, T166K, T166I, T166N, T166P, T166R, D167S D167D, D167I, D167G, D167T, D167A and/or D167N mutation in a TadA reference sequence (e.g., TadA*7.10,ecTadA, or TadA8e), and any alternative mutation at the corresponding position, or one or more corresponding mutations in another adenosine deaminase. Additional mutations are described in U.S. Patent Application Publication No. 2022/0307003 A1 U.S. Pat. No. 11,155,803, and International Patent Application Publications No. WO 2023/288304 A2, PCT/CN2022/143408, WO 2018/027078 A1, WO 2021/158921 A1 and WO 2023/034959 A2, the disclosures of which are incorporated herein by reference in their entirety for all purposes.

[0418] In some embodiments, the disclosure provides TadA variants comprising a V82T, Y147T, and/or a Q154S mutation. In some embodiments, the disclosure provides TadA variants comprising a V82T, Y147T, and/or a Q154S mutation. In some embodiments, the disclosure provides TadA*8.8 further comprising a V82T mutation. In some embodiments, the disclosure provides TadA*8.8 further comprising a V82T, a Y147T, and a Q154S mutation. In some embodiments, the disclosure provides TadA*8.17 further comprising a V82T mutation. In some embodiments, the disclosure provides TadA*8.17 further comprising a V82T, a Y147T, and a Q154S mutation. In some embodiments, the disclosure provides TadA*8.20 further comprising a V82T mutation. In some embodiments, the disclosure provides TadA*8.20 further comprising a V82T, a Y147T, and a Q154S mutation.

[0419] In embodiments, a variant of TadA*7.10 comprises one or more alterations selected from any of those alterations provided herein.

[0420] In particular embodiments, an adenosine deaminase heterodimer comprises a TadA*8 domain and an adenosine deaminase domain selected from Staphylococcus aureus (S. aureus) TadA, Bacillus subtilis (B. subtilis) TadA, Salmonella typhimurium (S. typhimurium) TadA, Shewanella putrefaciens (S. putrefaciens) TadA, Haemophilus influenzae F3031 (H. influenzae) TadA, Caulobacter crescentus (C. crescentus) TadA, Geobacter sulfurreducens (G. sulfurreducens) TadA, or TadA*7.10.

[0421] In some embodiments, the TadA*8 is a variant as shown in Table 5D. Table 5D shows certain amino acid position numbers in the TadA amino acid sequence and the amino acids present in those positions in the TadA-7.10 adenosine deaminase. Table 5D also shows amino acid changes in TadA variants relative to TadA-7.10 following phage-assisted non-continuous evolution (PANCE) and phage-assisted continuous evolution (PACE), as described in M. Richter et al., 2020, Nature Biotechnology, doi.org/10.1038/s41587-020-0453-z, the entire contents of which are incorporated by reference herein. In some embodiments, the TadA*8 is TadA*8a, TadA*8b, TadA*8c, TadA*8d, or TadA*8e. In some embodiments, the TadA*8 is TadA*8e. In one embodiment, an adenosine deaminase is a TadA*8 that comprises or consists essentially of SEQ ID NO: 316 or a fragment thereof having adenosine deaminase activity

TABLE 5D
Select TadA*8 Variants

| | | TadA amino acid number | | | | | | | | | |
|---|---|---|---|---|---|---|---|---|---|---|---|
| | TadA | 26 | 88 | 109 | 111 | 119 | 122 | 147 | 149 | 166 | 167 |
| | TadA- | R | V | A | T | D | H | Y | F | T | D |
| | 7.10 | | | | | | | | | | |
| PANCE 1 | | | | | R | | | | | | |
| PANCE 2 | | | | S/T | R | | | | | | |
| PACE | TadA-8a | C | | S | R | N | N | D | Y | I | N |
| | TadA-8b | | A | S | R | N | N | | Y | I | N |
| | TadA-8c | C | | S | R | N | N | | Y | I | N |
| | TadA-8d | | A | | R | N | | | Y | | |
| | TadA-8e | | | S | R | N | N | D | Y | I | N |

[0422] In some embodiments, the TadA variant is a variant as shown in Table 5E. Table 5E shows certain amino acid position numbers in the TadA amino acid sequence and the amino acids present in those positions in the TadA*7.10 adenosine deaminase. In some embodiments, the TadA variant is MSP605, MSP680, MSP823, MSP824, MSP825, MSP827, MSP828, or MSP829. In some embodiments, the TadA variant is MSP828. In some embodiments, the TadA variant is MSP829.

TABLE 5E
TadA Variants

| | TadA Amino Acid Number | | | | | | | |
|---|---|---|---|---|---|---|---|---|
| Variant | 36 | 76 | 82 | 147 | 149 | 154 | 157 | 167 |
| TadA-7.10 | L | I | V | Y | F | Q | N | D |
| MSP605 | | | G | T | | S | | |
| MSP680 | | Y | G | T | | S | | |
| MSP823 | H | | G | T | | S | K | |
| MSP824 | | | G | D | Y | S | | N |
| MSP825 | H | | G | D | Y | S | K | N |
| MSP827 | H | Y | G | T | | S | K | |
| MSP828 | | Y | G | D | Y | S | | N |
| MSP829 | H | Y | G | D | Y | S | K | N |

[0423] In particular embodiments, the fusion proteins or complexes comprise a single (e.g., provided as a monomer) TadA* (e.g., TadA*8 or TadA*9). Throughout the present disclosure, an adenosine deaminase base editor that comprises a single TadA* domain is indicates using the terminology ABEm or ABE #m, where “#” is an identifying number (e.g., ABE8.20m), where “m” indicates “monomer.” In some embodiments, the TadA* is linked to a Cas9 nickase. In some embodiments, the fusion proteins or complexes of the disclosure comprise as a heterodimer of a wild-type TadA (TadA(wt)) linked to a TadA*. Throughout the present disclosure, an adenosine deaminase base editor that comprises a single TadA* domain and a TadA(wt) domain is indicates using the terminology ABEd or ABE #d, where “#” is an identifying number (e.g., ABE8.20d), where “d” indicates “dimer.” In other embodiments, the fusion proteins or complexes of the disclosure comprise as a heterodimer of a TadA*7.10 linked to a TadA*. In some embodiments, the base editor is ABE8 comprising a TadA* variant monomer. In some embodiments, the base editor is ABE comprising a heterodimer of a TadA* and a TadA(wt). In some embodiments, the base editor is ABE comprising a heterodimer of a TadA* and TadA*7.10. In some embodiments, the base editor is ABE comprising a heterodimer of a TadA*. In some embodiments, the TadA* is selected from Tables 5A-5E.

[0424] In some embodiments, the adenosine deaminase is expressed as a monomer. In other embodiments, the adenosine deaminase is expressed as a heterodimer. In some embodiments, the deaminase or other polypeptide sequence lacks a methionine, for example when included as a component of a fusion protein. This can alter the numbering of positions. However, the skilled person will understand that such corresponding mutations refer to the same mutation.

[0425] Any of the mutations provided herein and any additional mutations (e.g., based on the ecTadA amino acid sequence) can be introduced into any other adenosine deaminases. Any of the mutations provided herein can be made individually or in any combination in a TadA reference sequence or another adenosine deaminase (e.g., ecTadA).

[0426] Details of A to G nucleobase editing proteins are described in International PCT Application No. PCT/US2017/045381 (WO2018/027078) and Gaudelli, N. M., et al., “Programmable base editing of A•T to G•C in genomic DNA without DNA cleavage” Nature, 551, 464-471 (2017), the entire contents of which are hereby incorporated by reference.

### C to T Editing

[0427] In some embodiments, a base editor disclosed herein comprises a fusion protein or complex comprising cytidine deaminase capable of deaminating a target cytidine (C) base of a polynucleotide to produce uridine (U), which has the base pairing properties of thymine. In some embodiments, for example where the polynucleotide is double-stranded (e.g., DNA), the uridine base can then be substituted with a thymidine base (e.g., by cellular repair machinery) to give rise to a C: G to a T: A transition. In other embodiments, deamination of a C to U in a nucleic acid by a base editor cannot be accompanied by substitution of the U to a T.

[0428] The deamination of a target C in a polynucleotide to give rise to a U is a non-limiting example of a type of base editing that can be executed by a base editor described herein. In another example, a base editor comprising a cytidine deaminase domain can mediate conversion of a cytosine (C) base to a guanine (G) base. For example, a U of a polynucleotide produced by deamination of a cytidine by a cytidine deaminase domain of a base editor can be excised from the polynucleotide by a base excision repair mechanism (e.g., by a uracil DNA glycosylase (UDG) domain), producing an abasic site. The nucleobase opposite the abasic site can then be substituted (e.g., by base repair machinery) with another base, such as a C, by for example a translesion polymerase. Although it is typical for a nucleobase opposite an abasic site to be replaced with a C, other substitutions (e.g., A, G or T) can also occur.

[0429] Accordingly, in some embodiments a base editor described herein comprises a deamination domain (e.g., cytidine deaminase domain) capable of deaminating a target C to a U in a polynucleotide. Further, as described below, the base editor may comprise additional domains which facilitate conversion of the U resulting from deamination to, in some embodiments, a T or a G. For example, a base editor comprising a cytidine deaminase domain can further comprise a uracil glycosylase inhibitor (UGI) domain to mediate substitution of a U by a T, completing a C-to-T base editing event. In another example, the base editor may comprise a uracil stabilizing protein as described herein. In another example, a base editor can incorporate a translesion polymerase to improve the efficiency of C-to-G base editing, since a translesion polymerase can facilitate incorporation of a C opposite an abasic site (i.e., resulting in incorporation of a G at the abasic site, completing the C-to-G base editing event).

[0430] A base editor comprising a cytidine deaminase as a domain can deaminate a target C in any polynucleotide, including DNA, RNA and DNA-RNA hybrids.

[0431] In some embodiments, a cytidine deaminase of a base editor comprises all or a portion (e.g., a functional portion) of an apolipoprotein B mRNA editing complex (APOBEC) family deaminase. APOBEC is a family of evolutionarily conserved cytidine deaminases. Members of this family are C-to-U editing enzymes. The N-terminal domain of APOBEC like proteins is the catalytic domain, while the C-terminal domain is a pseudocatalytic domain. More specifically, the catalytic domain is a zinc dependent cytidine deaminase domain and is important for cytidine deamination. APOBEC family members include APOBEC1, APOBEC2, APOBEC3A, APOBEC3B, APOBEC3C, APOBEC3D (“APOBEC3E” now refers to this), APOBEC3F, APOBEC3G, APOBEC3H, APOBEC4, and Activation-induced (cytidine) deaminase.

[0432] Other exemplary deaminases that can be fused to Cas9 according to aspects of this disclosure are provided below. In embodiments, the deaminases are activation-induced deaminases (AID). It should be understood that, in some embodiments, the active domain of the respective sequence can be used, e.g., the domain without a localizing signal (nuclear localization sequence, without nuclear export signal, cytoplasmic localizing signal).

[0433] Some aspects of the present disclosure are based on the recognition that modulating the deaminase domain catalytic activity of any of the fusion proteins or complexes described herein, for example by making point mutations in the deaminase domain, affect the processivity of the fusion proteins (e.g., base editors) or complexes. For example, mutations that reduce, but do not eliminate, the catalytic activity of a deaminase domain within a base editing fusion protein or complexes can make it less likely that the deaminase domain will catalyze the deamination of a residue adjacent to a target residue, thereby narrowing the deamination window. The ability to narrow the deamination window can prevent unwanted deamination of residues adjacent to specific target residues, which can reduce or prevent off-target effects.

[0434] In some embodiments, an APOBEC deaminase incorporated into a base editor may comprise one or more mutations selected from the group consisting of H121R, H122R, R126A, R126E, R118A, W90A, W90Y, and R132E of rAPOBEC1 (SEQ ID NO: 21); D316R, D317R, R320A, R320E, R313A, W285A, W285Y, and R326E of hAPOBEC3G; and any alternative mutation at the corresponding position, or one or more corresponding mutations in another APOBEC deaminase.

[0435] A number of modified cytidine deaminases are commercially available, including, but not limited to, SaBE3, SaKKH-BE3, VQR-BE3, EQR-BE3, VRER-BE3, YE1-BE3, EE-BE3, YE2-BE3, and YEE-BE3, which are available from Addgene (plasmids 85169, 85170, 85171, 85172, 85173, 85174, 85175, 85176, 85177). In some embodiments, a deaminase incorporated into a base editor comprises all or a portion (e.g., a functional portion) of an APOBEC1 deaminase.

[0436] In some embodiments, the fusion proteins or complexes of the disclosure comprise one or more cytidine deaminase domains. In some embodiments, the cytidine deaminases provided herein are capable of deaminating cytosine or 5-methylcytosine to uracil or thymine. In some embodiments, the cytidine deaminases provided herein are capable of deaminating cytosine in DNA. The cytidine deaminase may be derived from any suitable organism. In some embodiments, the cytidine deaminase is a naturally-occurring cytidine deaminase that includes one or more mutations corresponding to any of the mutations provided herein. One of skill in the art will be able to identify the corresponding residue in any homologous protein, e.g., by sequence alignment and determination of homologous residues. Accordingly, one of skill in the art would be able to generate mutations in any naturally-occurring cytidine deaminase that corresponds to any of the mutations described herein. In some embodiments, the cytidine deaminase is from a prokaryote. In some embodiments, the cytidine deaminase is from a bacterium. In some embodiments, the cytidine deaminase is from a mammal (e.g., human).

[0437] In some embodiments, the cytidine deaminase comprises an amino acid sequence that is at least 60%, at least 65%, at least 70%, at least 75%, at least 80%, at least 85%, at least 90%, at least 95%, at least 96%, at least 97%, at least 98%, at least 99%, or at least 99.5% identical to any one of the cytidine deaminase amino acid sequences set forth herein. It should be appreciated that cytidine deaminases provided herein may include one or more mutations (e.g., any of the mutations provided herein). Some embodiments provide a polynucleotide molecule encoding the cytidine deaminase nucleobase editor polypeptide of any previous aspect or as delineated herein. In some embodiments, the polynucleotide is codon optimized.

[0438] In embodiments, a fusion protein of the disclosure comprises two or more nucleic acid editing domains.

[0439] Details of C to T nucleobase editing proteins are described in International PCT Application No. PCT/US2016/058344 (WO2017/070632) and Komor, A. C., et al., “Programmable editing of a target base in genomic DNA without double-stranded DNA cleavage” Nature 533, 420-424 (2016), the entire contents of which are hereby incorporated by reference.

### Cytidine Adenosine Base Editors (CABEs)

[0440] In some embodiments, a base editor described herein comprises an adenosine deaminase variant that has increased cytidine deaminase activity. Such base editors may be referred to as “cytidine adenosine base editors (CABEs)” or “cytosine base editors derived from TadA* (CBE-Ts),” and their corresponding deaminase domains may be referred to as “TadA* acting on DNA cytosine (T_{AD}C)” domains. In some instances, an adenosine deaminase variant has both adenine and cytosine deaminase activity (i.e., is a dual deaminase). In some embodiments, the adenosine deaminase variants deaminate adenine and cytosine in DNA. In some embodiments, the adenosine deaminase variants deaminate adenine and cytosine in single-stranded DNA. In some embodiments, the adenosine deaminase variants deaminate adenine and cytosine in RNA. In some embodiments, the adenosine deaminase variant predominantly deaminates cytosine in DNA and/or RNA (e.g., greater than 30%, 40%, 50%, 60%, 70%, 80%, 90%, 95%, or 99% of all deaminations catalyzed by the adenosine deaminase variant, or the number of cytosine deaminations catalyzed by the variant is about or at least about 2-fold, 3-fold, 4-fold, 5-fold, 6-fold, 7-fold, 8-fold, 9-fold, 10-fold, 25-fold, 50-fold, 75-fold, 100-fold, 500-fold, or 1,000-fold greater than the number adenine deaminations catalyzed by the variant). In some embodiments, the adenosine deaminase variant has approximately equal cytosine and adenosine deaminase activity (e.g., the two activities are within about 10% or 20% of each other). In some embodiments, the adenosine deaminase variant has predominantly cytosine deaminase activity, and little, if any, adenosine deaminase activity. In some embodiments, the adenosine deaminase variant has cytosine deaminase activity, and no significant or no detectable adenosine deaminase activity. In some embodiments, the target polynucleotide is present in a cell in vitro or in vivo. In some embodiments, the cell is a bacteria, yeast, fungi, insect, plant, or mammalian cell.

[0441] In some embodiments, the CABE comprises a bacterial TadA deaminase variant (e.g., ecTadA). In some embodiments, the CABE comprises a truncated TadA deaminase variant. In some embodiments, the CABE comprises a fragment of a TadA deaminase variant. In some embodiments, the CABE comprises a TadA*8.20 variant.

[0442] In some embodiments, an adenosine deaminase variant of the disclosure is a TadA adenosine deaminase comprising one or more alterations that increase cytosine deaminase activity (e.g., at least about 10-fold, 20-fold, 30-fold, 40-fold, 50-fold, 60-fold, 70-fold or more increase) while maintaining adenosine deaminase activity (e.g., at least about 30%, 40%, 50% or more of the activity of a reference adenosine deaminase (e.g., TadA*8.20 or TadA*8.19)). In some instances, the adenosine deaminase variant comprises one or more alterations that increase cytosine deaminase activity (e.g., at least about 10-fold, 20-fold, 30-fold, 40-fold, 50-fold, 60-fold, 70-fold or more increase) relative to the activity of a reference adenosine deaminase and comprise undetectable adenosine deaminase activity or adenosine deaminase activity that is less than 30%, 20%, 10%, or 5% of that of a reference adenosine deaminase. In some embodiments, the reference adenosine deaminase is TadA*8.20 or TadA*8.19.

[0443] In some embodiments, the adenosine deaminase variant is an adenosine deaminase comprising two or more alterations at an amino acid position selected from the group consisting of 2, 4, 6, 8, 13, 17, 23, 27, 29, 30, 47, 48, 49, 67, 76, 77, 82, 84, 96, 100, 107, 112, 114, 115, 118, 119, 122, 127, 142, 143, 147, 149, 158, 159, 162 165, 166, and 167, of an amino acid sequence having at least about 70%, 75%, 80%, 85%, 90%, 95%, 98%, 99% or greater identity to SEQ ID NO: 1, or a corresponding alteration in another deaminase.

[0444] In some embodiments, the adenosine deaminase variant is an adenosine deaminase comprising one or more alterations selected from the group consisting of S2H, V4K, V4S, V4T, V4Y, F6G, F6H, F6Y, H8Q, R13G, T17A, T17W, R23Q, E27C, E27G, E27H, E27K, E27Q, E27S, E27G, P29A, P29G, P29K, V30F, V30I, R47G, R47S, A48G, I49K, 149M, 149N, 149Q, I49T, G67W, I76H, I76R, I76W, Y76H, Y76R, Y76W, F84A, F84M, H96N, G100A, G100K, T111H, G112H, A114C, G115M, M118L, H122G, H122R, H122T, N127I, N127K, N127P, A142E, R147H, A158V, Q159S, A162C, A162N, A162Q, and S165P of an amino acid sequence having at least about 70%, 75%, 80%, 85%, 90%, 95%, 98%, 99% or greater identity to SEQ ID NO: 1, or a corresponding alteration in another deaminase.

[0445] In some embodiments, the adenosine deaminase variant is an adenosine deaminase comprising an amino acid alteration or combination of amino acid alterations selected from those listed in any of Tables 6A-6F.

[0446] The residue identity of exemplary adenosine deaminase variants that are capable of deaminating adenine and/or cytidine in a target polynucleotide (e.g., DNA) is provided in Tables 6A-6F below. Further examples of adenosine deaminase variants include the following variants of 1.17 (see Table 6A): 1.17+E27H; 1.17+E27K; 1.17+E27S; 1.17+E27S+I49K; 1.17+E27G; 1.17+I49N; 1.17+E27G+I49N; and 1.17+E27Q. In some embodiments, any of the amino acid alterations provided herein are substituted with a conservative amino acid. Additional mutations known in the art can be further added to any of the adenosine deaminase variants provided herein.

[0447] In some embodiments, the base editor systems comprising a CABE provided herein have at least about a 30%, 40%, 50%, 60%, 70% or more C to T editing activity in a target polynucleotide (e.g., DNA). In some embodiments, a base editor system comprising a CABE as provided herein has an increased C to T base editing activity (e.g., increased at least about 30-fold, 40-fold, 50-fold, 60-fold, 70-fold or more) relative to a reference base editor system comprising a reference adenosine deaminase (e.g., TadA*8.20 or TadA*8.19).

TABLE 6A
Adenosine Deaminase Variants. Mutations are indicated with reference to
TadA*8.20. “S” indicates “Surface,” and “NAS” indicates “Near Active Site.”

| | location in structure | | | | | | | | | | |
|---|---|---|---|---|---|---|---|---|---|---|---|
| | N/A | S h1 | S h1 | S h1 | NAS | NAS | NAS | NAS | | S | |
| | Amino Acid No. (*START Met is AA#1) | | | | | | | | | | |
| | 2 | 8 | 13 | 17 | 27 | 47 | 48 | 49 | 67 | 76 | 77 |
| TadA*8.20 | S | H | R | T | E | R | A | I | G | Y | D |
| TadA*8.19 | | | | | | | | | | I | |
| 1.1 | | | | | H | | | | | I | |
| 1.2 | | | | | H | | | K | | I | |
| 1.3 | | | | | S | | | K | | I | |
| 1.4 | | | | | S | | | K | | I | |
| 1.5 | | | | | K | | | | | | |
| 1.6 | | | | | K | | | | | | |
| 1.7 | | | | | H | | | | | I | |
| 1.8 | | | | | S | | | K | W | | |
| 1.9 | | | | | | | | T | M | | |
| 1.10 | | | | | C | | | | | I | |
| 1.11 | | | G | | Q | | | | | | |
| 1.12 | | | | A | H | | | M | | I | |
| 1.13 | | | | | | | | Q | | I | |
| 1.14 | H | | | | | | | K | | I | |
| 1.15 | | | | | | S | | | | | |
| 1.16 | | Q | | | | | | Q | | I | |
| 1.17 | | | | A | | | G | | | | |
| 1.18 | | | | | G | | | | | | |
| 1.19 | | | | | G | | | N | | | |
| 1.20 | | | | | G | | | | | | G |

Adenosine Deaminase Variants. Mutations are indicated with reference to TadA*8.20.
“I” indicates “Internal,” “S” indicates “Surface,” and “NAS” indicates “Near Active Site.”

| | location in structure | | | | | | | | | | | |
|---|---|---|---|---|---|---|---|---|---|---|---|---|
| | I | NAS | | NAS | S | | S | S | S | | S | |
| | Amino Acid No. (*START Met is AA#1) | | | | | | | | | | | |
| | 82 | 84 | 96 | 107 | 112 | 115 | 118 | 119 | 127 | 142 | 162 | 165 |
| TadA*8.20 | S | F | H | R | G | G | M | D | N | A | A | S |
| TadA*8.19 | | | | | | | | | | | | |
| 1.1 | | M | | | | | | | | | | |
| 1.2 | | | | | | | | | | | | |
| 1.3 | | | | | | | | | | | | |
| 1.4 | | | | | | | | | | | N | |
| 1.5 | | | | | | | | | | | | |
| 1.6 | | | | | | | | N | | | | |
| 1.7 | | | | | | | | | | | | |
| 1.8 | | | | | | | | | | | | |
| 1.9 | | | N | | | | | | | | | |
| 1.10 | | | | | | | | N | | | | |
| 1.11 | | | | | | | | | K | | | |
| 1.12 | | | | | | | L | | | | | |
| 1.13 | | | | | | M | | | | | | |
| 1.14 | | | | | H | | | | | | | |
| 1.15 | | | | C | | | | | | | | |
| 1.16 | | | | | | | | | | | | |
| 1.17 | T | | | | | | | | | E | | |
| 1.18 | | | | | | | | | | | | |
| 1.19 | | | | | | | | | | | | |
| 1.20 | | | | | | | | | | | | P |

TABLE 6B
Adenosine deaminase variants. Mutations are indicated with
reference to TadA*8.20.

| | Position No. | | | | | | | | | |
|---|---|---|---|---|---|---|---|---|---|---|
| | 27 | 29 | 30 | 49 | 82 | 84 | 107 | 112 | 115 | 142 |
| | TadA*8.20 | | | | | | | | | |
| | E | P | V | I | S | F | R | G | G | A |
| | Alterations Evaluated | | | | | | | | | |
| | G/S/H | G/A/K | I/L/F | K | T | L/A | C | H | M | E |
| S1.1 | S | | | K | T | | | | | |
| S1.2 | S | | | K | T | | C | | | |
| S1.3 | S | | | K | T | | | H | | |
| S1.4 | S | | | K | T | | | | M | |
| S1.5 | S | | | K | T | | | | | E |
| S1.6 | S | | | K | T | | C | H | | |
| S1.7 | S | | | K | T | | C | | M | |
| S1.8 | S | | | K | T | | C | | | E |
| S1.9 | S | | | K | T | | | H | | E |
| S1.10 | S | | | K | T | | | | M | E |
| S1.11 | S | | | K | T | | C | H | M | E |
| S1.12 | S | | I | K | T | | | | | |
| S1.13 | S | | I | K | T | | C | | | |
| S1.14 | S | | I | K | T | | | H | | |
| S1.15 | S | | I | K | T | | | | M | |
| S1.16 | S | | I | K | T | | | | | E |
| S1.17 | S | | I | K | T | | C | H | | |
| S1.18 | S | | I | K | T | | C | | M | |
| S1.19 | S | | I | K | T | | C | | | E |
| S1.20 | S | | I | K | T | | | H | | E |
| S1.21 | S | | I | K | T | | | | M | E |
| S1.22 | S | | I | K | T | | C | H | M | E |
| S1.23 | S | | L | K | T | | | | | |
| S1.24 | S | | L | K | T | | C | | | |
| S1.25 | S | | L | K | T | | | H | | |
| S1.26 | S | | L | K | T | | | | M | |
| S1.27 | S | | L | K | T | | | | | E |
| S1.28 | S | | L | K | T | | C | H | | |
| S1.29 | S | | L | K | T | | C | | M | |
| S1.30 | S | | L | K | T | | C | | | E |
| S1.31 | S | | L | K | T | | | H | | E |
| S1.32 | S | | L | K | T | | | | M | E |
| S1.33 | S | | L | K | T | | C | H | M | E |
| S1.34 | S | | F | K | T | A | | | | |
| S1.35 | S | | F | K | T | A | C | | | |
| S1.36 | S | | F | K | T | A | | H | | |
| S1.37 | S | | F | K | T | A | | | M | |
| S1.38 | S | | F | K | T | A | | | | E |
| S1.39 | S | | F | K | T | A | C | H | | |
| S1.40 | S | | F | K | T | A | C | | M | |
| S1.41 | S | | F | K | T | A | C | | | E |
| S1.42 | S | | F | K | T | A | | H | | E |
| S1.43 | S | | F | K | T | A | | | M | E |
| S1.44 | S | | F | K | T | A | C | H | M | E |
| S1.45 | S | | | K | T | L | | | | |
| S1.46 | S | | | K | T | L | C | | | |
| S1.47 | S | | | K | T | L | | H | | |
| S1.48 | S | | | K | T | L | | | M | |
| S1.49 | S | | | K | T | L | | | | E |
| S1.50 | S | | | K | T | L | C | H | | |
| S1.51 | S | | | K | T | L | C | | M | |
| S1.52 | S | | | K | T | L | C | | | E |
| S1.53 | S | | | K | T | L | | H | | E |
| S1.54 | S | | | K | T | L | | | M | E |
| S1.55 | S | | | K | T | L | C | H | M | E |
| S1.56 | S | | I | K | T | L | | | | |
| S1.57 | S | | I | K | T | L | C | | | |
| S1.58 | S | | I | K | T | L | | H | | |
| S1.59 | S | | I | K | T | L | | | M | |
| S1.60 | S | | I | K | T | L | | | | E |
| S1.61 | S | | I | K | T | L | C | H | | |
| S1.62 | S | | I | K | T | L | C | | M | |
| S1.63 | S | | I | K | T | L | C | | | E |
| S1.64 | S | | I | K | T | L | | H | | E |
| S1.65 | S | | I | K | T | L | | | M | E |
| S1.66 | S | | I | K | T | L | C | H | M | E |
| S1.67 | S | G | | K | T | | | | | |
| S1.68 | S | G | | K | T | | C | | | |
| S1.69 | S | G | | K | T | | | H | | |
| S1.70 | S | G | | K | T | | | | M | |
| S1.71 | S | G | | K | T | | | | | E |
| S1.72 | S | G | | K | T | | C | H | | |
| S1.73 | S | G | | K | T | | C | | M | |
| S1.74 | S | G | | K | T | | C | | | E |
| S1.75 | S | G | | K | T | | | H | | E |
| S1.76 | S | G | | K | T | | | | M | E |
| S1.77 | S | G | | K | T | | C | H | M | E |
| S1.78 | | G | | K | T | | | | | |
| S1.79 | | G | | K | T | | C | | | |
| S1.80 | | G | | K | T | | | H | | |
| S1.81 | | G | | K | T | | | | M | |
| S1.82 | | G | | K | T | | | | | E |
| S1.83 | | G | | K | T | | C | H | | |
| S1.84 | | G | | K | T | | C | | M | |
| S1.85 | | G | | K | T | | C | | | E |
| S1.86 | | G | | K | T | | | H | | E |
| S1.87 | | G | | K | T | | | | M | E |
| S1.88 | | G | | K | T | | C | H | M | E |
| S1.89 | | K | | K | T | | | | | |
| S1.90 | | K | | K | T | | C | | | |
| S1.91 | | K | | K | T | | | H | | |
| S1.92 | | K | | K | T | | | | M | |
| S1.93 | | K | | K | T | | | | | E |
| S1.94 | | K | | K | T | | C | H | | |
| S1.95 | | K | | K | T | | C | | M | |
| S1.96 | | K | | K | T | | C | | | E |
| S1.97 | | K | | K | T | | | H | | E |
| S1.98 | | K | | K | T | | | | M | E |
| S1.99 | | K | | K | T | | C | H | M | E |
| S1.100 | | K | I | K | T | | | | | |
| S1.101 | | K | I | K | T | | C | | | |
| S1.102 | | K | I | K | T | | | H | | |
| S1.103 | | K | I | K | T | | | | M | |
| S1.104 | | K | I | K | T | | | | | E |
| S1.105 | | K | I | K | T | | C | H | | |
| S1.106 | | K | I | K | T | | C | | M | |
| S1.107 | | K | I | K | T | | C | | | E |
| S1.108 | | K | I | K | T | | | H | | E |
| S1.109 | | K | I | K | T | | | | M | E |
| S1.110 | | K | I | K | T | | C | H | M | E |
| S1.111 | | K | | K | T | L | | | | |
| S1.112 | | K | | K | T | L | C | | | |
| S1.113 | | K | | K | T | L | | H | | |
| S1.114 | | K | | K | T | L | | | M | |
| S1.115 | | K | | K | T | L | | | | E |
| S1.116 | | K | | K | T | L | C | H | | |
| S1.117 | | K | | K | T | L | C | | M | |
| S1.118 | | K | | K | T | L | C | | | E |
| S1.119 | | K | | K | T | L | | H | | E |
| S1.120 | | K | | K | T | L | | | M | E |
| S1.121 | | K | | K | T | L | C | H | M | E |
| S1.122 | | K | I | K | T | L | | | | |
| S1.123 | | K | I | K | T | L | C | | | |
| S1.124 | | K | I | K | T | L | | H | | |
| S1.125 | | K | I | K | T | L | | | M | |
| S1.126 | | K | I | K | T | L | | | | E |
| S1.127 | | K | I | K | T | L | C | H | | |
| S1.128 | | K | I | K | T | L | C | | M | |
| S1.129 | | K | I | K | T | L | C | | | E |
| S1.130 | | K | I | K | T | L | | H | | E |
| S1.131 | | K | I | K | T | L | | | M | E |
| S1.132 | | K | I | K | T | L | C | H | M | E |
| S1.133 | G | | | K | T | | | | | |
| S1.134 | G | | | K | T | | C | | | |
| S1.135 | G | | | K | T | | | H | | |
| S1.136 | G | | | K | T | | | | M | |
| S1.137 | G | | | K | T | | | | | E |
| S1.138 | G | | | K | T | | C | H | | |
| S1.139 | G | | | K | T | | C | | M | |
| S1.140 | G | | | K | T | | C | | | E |
| S1.141 | G | | | K | T | | | H | | E |
| S1.142 | G | | | K | T | | | | M | E |
| S1.143 | G | | | K | T | | C | H | M | E |
| S1.144 | H | | | K | T | | | | | |
| S1.145 | H | | | K | T | | C | | | |
| S1.146 | H | | | K | T | | | H | | |
| S1.147 | H | | | K | T | | | | M | |
| S1.148 | H | | | K | T | | | | | E |
| S1.149 | H | | | K | T | | C | H | | |
| S1.150 | H | | | K | T | | C | | M | |
| S1.151 | H | | | K | T | | C | | | E |
| S1.152 | H | | | K | T | | | H | | E |
| S1.153 | H | | | K | T | | | | M | E |
| S1.154 | H | | | K | T | | C | H | M | E |
| S1.155 | S | | | | T | | | | | |
| S1.156 | S | | | | T | | C | | | |
| S1.157 | S | | | | T | | | H | | |
| S1.158 | S | | | | T | | | | M | |
| S1.159 | S | | | | T | | | | | E |
| S1.160 | S | | | | T | | C | H | | |
| S1.161 | S | | | | T | | C | | M | |
| S1.162 | S | | | | T | | C | | | E |
| S1.163 | S | | | | T | | | H | | E |
| S1.164 | S | | | | T | | | | M | E |
| S1.165 | S | | | | T | | C | H | M | E |
| S1.166 | | A | | | T | | | | | |
| S1.167 | | A | | | T | | C | | | |
| S1.168 | | A | | | T | | | H | | |
| S1.169 | | A | | | T | | | | M | |
| S1.170 | | A | | | T | | | | | E |
| S1.171 | | A | | | T | | C | H | | |
| S1.172 | | A | | | T | | C | | M | |
| S1.173 | | A | | | T | | C | | | E |
| S1.174 | | A | | | T | | | H | | E |
| S1.175 | | A | | | T | | | | M | F |
| S1.176 | | A | | | T | | C | H | M | E |
| S1.177 | S | | I | | T | | | | | |
| S1.178 | S | | I | | T | | C | | | |
| S1.179 | S | | I | | T | | | H | | |
| S1.180 | S | | I | | T | | | | M | |
| S1.181 | S | | I | | T | | | | | E |
| S1.182 | S | | I | | T | | C | H | | |
| S1.183 | S | | I | | T | | C | | M | |
| S1.184 | S | | I | | T | | C | | | E |
| S1.185 | S | | I | | T | | | H | | E |
| S1.186 | S | | I | | T | | | | M | E |
| S1.187 | S | | I | | T | | C | H | M | E |
| S1.188 | | A | I | | T | L | | | | |
| S1.189 | | A | I | | T | L | C | | | |
| S1.190 | | A | I | | T | L | | H | | |
| S1.191 | | A | I | | T | L | | | M | |
| S1.192 | | A | I | | T | L | | | | E |
| S1.193 | | A | I | | T | L | C | H | | |
| S1.194 | | A | I | | T | L | C | | M | |
| S1.195 | | A | I | | T | L | C | | | E |
| S1.196 | | A | I | | T | L | | H | | E |
| S1.197 | | A | I | | T | L | | | M | E |
| S1.198 | | A | I | | T | L | C | H | M | E |
| S1.199 | S | A | L | K | T | L | C | H | M | E |

TABLE 6C
Adenosine deaminse variants. Mutations are indicated with reference to variant 1.2 (Table 6A).

| | | Residue identity (START Met is amino acid #1) | | | | | | | | |
|---|---|---|---|---|---|---|---|---|---|---|
| Variant Name | Alternative Variant Names | 4 | 6 | 17 | 23 | 76 | 77 | 100 | 111 | 114 |
| Reference | 1.2 (see Table 6A) | V | F | T | R | I | D | G | T | A |
| TadAC2.1 | pDKL-135; 2.1 | K | | | | | | | | C |
| TadAC2.2 | pDKL-136; 2.2 | K | | | | | G | | | |
| TadAC2.3 | pDKL-137; 2.3 | | Y | | | | | A | | |
| TadAC2.4 | pDKL-138; 2.4 | T | | | | R | | | | |
| TadAC2.5 | pDKL-139; 2.5 | | Y | | | W | | | | |
| TadAC2.6 | pDKL-140; 2.6 | | Y | | | | | | | |
| TadAC2.7 | pDKL-141; 2.7 | | Y | | | | | | | C |
| TadAC2.8 | pDKL-142; 2.8 | | Y | | | | | | | |
| TadAC2.9 | pDKL-143; 2.9 | K | | | | M | | | | |
| TadAC2.10 | pDKL-144; 2.10 | | G | | | R | | K | | |
| TadAC2.11 | pDKL-145; 2.11 | | H | | | | | | | |
| TadAC2.12 | pDKL-146; 2.12 | | | | | | | | | C |
| TadAC2.13 | pDKL-147; 2.13 | | Y | | | H | | | | |
| TadAC2.14 | pDKL-148; 2.14 | | | | | | | | | |
| TadAC2.15 | pDKL-149; 2.15 | | | | Q | R | | | | |
| TadAC2.16 | pDKL-150; 2.16 | | | | | H | | | | |
| TadAC2.17 | pDKL-151; 2.17 | | Y | | | | | | H | |
| TadAC2.18 | pDKL-152; 2.18 | | | | | W | | | | |
| TadAC2.19 | pDKL-153; 2.19 | | | | | | | | H | |
| TadAC2.20 | pDKL-154; 2.20 | | | | | | | | | |
| TadAC2.21 | pDKL-155; 2.21 | | Y | | | R | | | | |
| TadAC2.22 | pDKL-156; 2.22 | | | W | | H | | | | |
| TadAC2.23 | pDKL-157; 2.23 | S | | | | Y | | | | |
| TadAC2.24 | pDKL-158; 2.24 | | | | | | | | | |
| | | Residue identity (START Met is amino acid #1) | | | | | | | | |
| Variant Name | Alternative Variant Names | 119 | 122 | 127 | 143 | 147 | 158 | 159 | 162 | 166 |
| Reference | 1.2 (see Table 6A) | D | H | N | A | R | A | Q | A | T |
| TadAC2.1 | pDKL-135; 2.1 | | | | | | | | | |
| TadAC2.2 | pDKL-136; 2.2 | | | | | | | | | |
| TadAC2.3 | pDKL-137; 2.3 | | R | | | | | | | |
| TadAC2.4 | pDKL-138; 2.4 | | G | | | | | | | |
| TadAC2.5 | pDKL-139; 2.5 | | | | | | | | | |
| TadAC2.6 | pDKL-140; 2.6 | N | | | | | | | | |
| TadAC2.7 | pDKL-141; 2.7 | | | | | | | | | |
| TadAC2.8 | pDKL-142; 2.8 | | | | | | | | | |
| TadAC2.9 | pDKL-143; 2.9 | | T | | | | | | | |
| TadAC2.10 | pDKL-144; 2.10 | | | | | | | | | |
| TadAC2.11 | pDKL-145; 2.11 | | N | | | | | | | |
| TadAC2.12 | pDKL-146; 2.12 | | | | | | | | | |
| TadAC2.13 | pDKL-147; 2.13 | | R | | | | | | | I |
| TadAC2.14 | pDKL-148; 2.14 | | | P | | | | | | |
| TadAC2.15 | pDKL-149; 2.15 | | | | | | | | | |
| TadAC2.16 | pDKL-150; 2.16 | | R | | | | V | | | |
| TadAC2.17 | pDKL-151; 2.17 | | | | | | | | | |
| TadAC2.18 | pDKL-152; 2.18 | | | | | | | | | |
| TadAC2.19 | pDKL-153; 2.19 | | G | | | | | | C | |
| TadAC2.20 | pDKL-154; 2.20 | | | | E | | | | | |
| TadAC2.21 | pDKL-155; 2.21 | | | | | | | | | |
| TadAC2.22 | pDKL-156; 2.22 | | G | | | | V | | | |
| TadAC2.23 | pDKL-157; 2.23 | | | | E | | | S | | |
| TadAC2.24 | pDKL-158; 2.24 | | | I | | | | | Q | |

TABLE 6D
Adenosine deaminase variants. Mutations are indicated with reference to

| AA Positions | 6 | 27 | 49 | 76 | 77 | 82 | 107 | 112 | 114 | 115 | 119 | 122 | 127 | 142 | 143 |
|---|---|---|---|---|---|---|---|---|---|---|---|---|---|---|---|
| TadA*8.20 | F | E | I | Y | D | S | R | G | A | G | D | H | N | A | A |
| S1.154 | F | H | K | Y | D | T | C | H | | M | | | | E | |
| Alterations | Y | | | W | G | | | | C | | N | G | P | | E |
| from Table 6C | | | | | | | | | | | | | | | |
| S2.1 | Y | H | K | W | | T | C | H | | M | | | | E | |
| S2.2 | Y | H | K | | G | T | C | H | | M | | | | E | |
| S2.3 | Y | H | K | | | T | C | H | C | M | | | | E | |
| S2.4 | Y | H | K | | | T | C | H | | M | N | | | E | |
| S2.5 | Y | H | K | | | T | C | H | | M | | G | | | |
| S2.6 | Y | H | K | | | T | C | H | | M | | | P | E | |
| S2.7 | Y | H | K | | | T | C | H | | M | | | | E | E |
| S2.8 | Y | H | K | | | T | C | H | | M | | | | A | E |
| S2.9 | Y | H | K | W | G | T | C | H | | M | | | | E | |
| S2.10 | Y | H | K | W | | T | C | H | C | M | | | | E | |
| S2.11 | Y | H | K | W | | T | C | H | | M | N | | | E | |
| S2.12 | Y | H | K | W | | T | C | H | | M | | G | | E | |
| S2.13 | Y | H | K | W | | T | C | H | | M | | | P | E | |
| S2.14 | Y | H | K | W | | T | C | H | | M | | | | E | E |
| S2.15 | Y | H | K | W | | T | C | H | | M | | | | A | E |
| S2.16 | Y | H | K | | G | T | C | H | C | M | | | | E | |
| S2.17 | Y | H | K | | G | T | C | H | | M | N | | | E | |
| S2.18 | Y | H | K | | G | T | C | H | | M | | G | | E | |
| S2.19 | Y | H | K | | G | T | C | H | | M | | | P | E | |
| S2.20 | Y | H | K | | G | T | C | H | | M | | | | E | E |
| S2.21 | Y | H | K | | G | T | C | H | | M | | | | A | E |
| S2.22 | Y | H | K | | | T | C | H | C | M | N | | | E | |
| S2.23 | Y | H | K | | | T | C | H | C | M | | G | | E | |
| S2.24 | Y | H | K | | | T | C | H | C | M | | | P | E | |
| S2.25 | Y | H | K | | | T | C | H | | M | N | G | | E | |
| S2.26 | Y | H | K | | | T | C | H | | M | N | | P | E | |
| S2.27 | Y | H | K | | | T | C | H | | M | | G | P | E | |
| S2.28 | Y | H | K | W | G | T | C | H | C | M | | | | E | |
| S2.29 | Y | H | K | W | G | T | C | H | | M | N | | | E | |
| S2.30 | Y | H | K | W | G | T | C | H | | M | | G | | E | |
| S2.31 | Y | H | K | W | G | T | C | H | | M | | | P | E | |
| S2.32 | Y | H | K | W | G | T | C | H | | M | | | | E | E |
| S2.33 | Y | H | K | W | G | T | C | H | | M | | | | A | E |
| S2.34 | Y | H | K | W | | T | C | H | C | M | N | | | E | |
| S2.35 | Y | H | K | W | | T | C | H | C | M | | G | | E | |
| S2.36 | Y | H | K | W | | T | C | H | C | M | | | P | E | |
| S2.37 | Y | H | K | W | | T | C | H | C | M | | | | E | E |
| S2.38 | Y | H | K | W | | T | C | H | C | M | | | | A | E |
| S2.39 | Y | H | K | W | | T | C | H | | M | N | G | | E | |
| S2.40 | Y | H | K | W | | T | C | H | | M | N | | P | E | |
| S2.41 | Y | H | K | W | | T | C | H | | M | | G | P | E | |
| S2.42 | Y | H | K | W | | T | C | H | C | M | N | G | | E | |
| S2.43 | Y | H | K | W | | T | C | H | C | M | N | | P | E | |
| S2.44 | Y | H | K | W | | T | C | H | C | M | | G | P | E | |
| S2.45 | Y | H | K | W | G | T | C | H | C | M | N | | | E | |
| S2.46 | Y | H | K | W | G | T | C | H | C | M | | G | | E | |
| S2.47 | Y | H | K | W | G | T | C | H | C | M | | | P | E | |
| S2.48 | Y | H | K | W | G | T | C | H | C | M | | | | E | E |
| $2.49 | Y | H | K | W | G | T | C | H | C | M | | | | A | E |
| S2.50 | Y | H | K | W | G | T | C | H | C | M | N | G | | E | |
| S2.51 | Y | H | K | W | G | T | C | H | C | M | N | | P | E | |
| S2.52 | Y | H | K | W | G | T | C | H | C | M | | G | P | E | |
| S2.53 | Y | H | K | W | | T | C | H | C | M | N | G | P | E | E |
| S2.54 | Y | H | K | W | | T | C | H | C | M | N | G | P | A | E |
| S2.55 | Y | H | K | W | G | T | C | H | C | M | N | G | P | E | E |
| S2.56 | Y | H | K | W | G | T | C | H | C | M | N | G | P | A | E |

TABLE 6E
Hybrid constructs. Mutations are indicated with reference to TadA*7.10.

| | TadA amino acid subsitutions | | | | | | | | | | | |
|---|---|---|---|---|---|---|---|---|---|---|---|---|
| | 76 | 82 | 109 | 111 | 119 | 122 | 123 | 147 | 149 | 154 | 166 | 167 |
| TadA*7.10 | I | V | A | T | D | H | Y | Y | F | Q | T | D |
| TadA*8e | | | S | R | N | N | | D | Y | | I | N |
| TadA*8.20 | Y | S | | | | | H | R | | R | | |
| TadA*8.17 | | S | | | | | | | | R | | |
| pNMG-B878 | Y | S | | | | | H | D | | R | | |
| pNMG-B879 | Y | S | | | | | H | R | Y | R | | |
| pNMG-B880 | Y | S | | | | | H | R | | R | I | |
| pNMG-B881 | Y | S | | | | | H | R | | R | | N |
| pNMG-B882 | Y | S | | | | | H | D | Y | R | I | N |
| pNMG-B883 | Y | S | | R | N | | H | R | | R | | |
| pNMG-B884 | Y | S | S | R | N | N | H | R | | R | | |
| pNMG-B885 | Y | S | S | | | | H | R | | R | | |
| pNMG-B886 | Y | S | | R | | | H | R | | R | | |
| pNMG-B887 | Y | S | | | N | | H | R | | R | | |
| pNMG-B888 | Y | S | | | | N | H | R | | R | | |
| pNMG-B889 | Y | S | S | R | | | H | R | | R | | |
| pNMG-B890 | Y | S | | | N | N | H | R | | R | | |
| TadA*7.10 | I | V | A | T | D | H | Y | Y | F | Q | T | D |
| TadA*8e | | | S | R | N | N | | D | Y | | I | N |
| TadA*8.20 | Y | S | | | | | H | R | | R | | |
| TadA*8.17 | | S | | | | | | | | R | | |
| pNMG-B891 | Y | S | S | R | N | N | H | D | Y | R | I | N |

TABLE 6F
Base editor variants. Mutations are indicated with reference to TadA*8.19/8.20.

| AA positions: | 17 | 27 | 48 | 49 | 76 | 82 | 84 | 118 | 142 | 147 | 149 | 166 | 167 |
|---|---|---|---|---|---|---|---|---|---|---|---|---|---|
| ABE8.19m/8.20m | T | E | A | I | Y/I | S | F | M | A | Y | F | T | D |
| 1.1 + 8e(B879) | | H | | | I | | M | | | | Y | | |
| 1.2 + 8e(B879) | | H | | K | I | | | | | | Y | | |
| 1.12 + 8e(B879) | A | H | | M | I | | | L | | | Y | | |
| 1.17 + 8e(B879) | A | | G | | | T | | | E | | Y | | |
| 1.18 + 8e(B879) | | G | | | | | | | | | Y | | |
| 1.19 + 8e(B879) | | G | | N | | | | | | | Y | | |
| 1.1 + 8e(B882) | | H | | | I | | M | | | D | Y | I | N |
| 1.2 + 8e(B882) | | H | | K | I | | | | | D | Y | I | N |
| 1.12 + 8e(B882) | A | H | | M | I | | | L | | D | Y | I | N |
| 1.17 + 8e(B882) | A | | G | | | T | | | E | D | Y | I | N |
| 1.18 + 8e(B882) | | G | | | | | | | | D | Y | I | N |
| 1.19 + 8e(B882) | | G | | N | | | | | | D | Y | I | N |

### Guide Polynucleotides

[0448] A polynucleotide programmable nucleotide binding domain, when in conjunction with a bound guide polynucleotide (e.g., gRNA), can specifically bind to a target polynucleotide sequence (i.e., via complementary base pairing between bases of the bound guide nucleic acid and bases of the target polynucleotide sequence) and thereby localize the base editor to the target nucleic acid sequence desired to be edited. In some embodiments, the target polynucleotide sequence comprises single-stranded DNA or double-stranded DNA. In some embodiments, the target polynucleotide sequence comprises RNA. In some embodiments, the target polynucleotide sequence comprises a DNA-RNA hybrid.

[0449] In an embodiment, a guide polynucleotide described herein can be RNA or DNA. In one embodiment, the guide polynucleotide is a gRNA.

[0450] In some embodiments, the guide polynucleotide is at least one single guide RNA (“sgRNA” or “gRNA”). In some embodiments, a guide polynucleotide comprises two or more individual polynucleotides, which can interact with one another via for example complementary base pairing (e.g., a dual guide polynucleotide, dual gRNA). For example, a guide polynucleotide may comprise a CRISPR RNA (crRNA) and a trans-activating CRISPR RNA (tracrRNA) or may comprise one or more trans-activating CRISPR RNA (tracrRNA).

[0451] A guide polynucleotide may include natural or non-natural (or unnatural) nucleotides (e.g., peptide nucleic acid or nucleotide analogs). In some cases, the targeting region of a guide nucleic acid sequence (e.g., a spacer) can be at least 15, 16, 17, 18, 19, 20, 21, 22, 23, 24, 25, 26, 27, 28, 29, or 30 nucleotides in length.

[0452] In some embodiments, the methods described herein can utilize an engineered Cas protein. A guide RNA (gRNA) is a short synthetic RNA composed of a scaffold sequence necessary for Cas-binding and a user-defined ˜20 nucleotide spacer that defines the genomic target to be modified. Exemplary gRNA scaffold sequences are provided in the sequence listing as SEQ ID NOs: 317-327 and 425. Thus, a skilled artisan can change the genomic target of the Cas protein specificity is partially determined by how specific the gRNA targeting sequence is for the genomic target compared to the rest of the genome. In embodiments, the spacer is about 10, 11, 12, 13, 14, 15, 16, 17, 18, 19, 20, 22, 23, 24, 25, or more nucleotides in length. The spacer of a gRNA can be or can be about 19, 20, or 21 nucleotides in length.

[0453] A gRNA or a guide polynucleotide can target any exon or intron of a gene target. In some embodiments, a composition comprises multiple gRNAs that all target the same exon or multiple gRNAs that target different exons. An exon and/or an intron of a gene can be targeted. A gRNA or a guide polynucleotide can target a nucleic acid sequence of about 20 nucleotides or less than about 20 nucleotides (e.g., at least about 5, 10, 15, 16, 17, 18, 19, 20, 21, 22, 23, 24, 25, 30 nucleotides), or anywhere between about 1-100 nucleotides (e.g., 5, 10, 15, 16, 17, 18, 19, 20, 21, 22, 23, 24, 25, 30, 40, 50, 60, 70, 80, 90, 100). A target nucleic acid sequence can be or can be about 20 bases immediately 5′ of the first nucleotide of the PAM. A gRNA can target a nucleic acid sequence. A target nucleic acid can be at least or at least about 1-10, 1-20, 1-30, 1-40, 1-50, 1-60, 1-70, 1-80, 1-90, or 1-100 nucleotides.

[0454] The guide polynucleotides may comprise standard ribonucleotides, modified ribonucleotides (e.g., pseudouridine), ribonucleotide isomers, and/or ribonucleotide analogs.

[0455] In some embodiments, a base editor system may comprise multiple guide polynucleotides, e.g., gRNAs. For example, the gRNAs may target to one or more target loci (e.g., at least 1 gRNA, at least 2 gRNA, at least 5 gRNA, at least 10 gRNA, at least 20 gRNA, at least 30 g RNA, at least 50 gRNA) comprised in a base editor system. The multiple gRNA sequences can be tandemly arranged and may be separated by a direct repeat.

### Modified Polynucleotides

[0456] To enhance expression, stability, and/or genomic/base editing efficiency, and/or reduce possible toxicity, the base editor-coding sequence (e.g., mRNA) and/or the guide polynucleotide (e.g., gRNA) can be modified to include one or more modified nucleotides and/or chemical modifications, e.g. using pseudo-uridine, 5-Methyl-cytosine, 2′-O-methyl-3′-phosphonoacetate, 2′-O-methyl thioPACE (MSP), 2′-O-methyl-PACE (MP), 2′-fluoro RNA (2′-F-RNA), =constrained ethyl (S-cEt), 2′-O-methyl (‘M’), 2′-O-methyl-3′-phosphorothioate (‘MS’), 2′-O-methyl-3′-thiophosphonoacetate (‘MSP’), 5-methoxyuridine, phosphorothioate, and N1-Methylpseudouridine. Chemically protected gRNAs can enhance stability and editing efficiency in vivo and ex vivo. Methods for using chemically modified mRNAs and guide RNAs are known in the art and described, for example, by Jiang et al., Chemical modifications of adenine base editor mRNA and guide RNA expand its application scope. Nat Commun 11, 1979 (2020). doi.org/10.1038/s41467-020-15892-8, Callum et al., N1-Methylpseudouridine substitution enhances the performance of synthetic mRNA switches in cells, Nucleic Acids Research, Volume 48, Issue 6, 6 Apr. 2020, Page e35, and Andries et al., Journal of Controlled Release, Volume 217, 10 Nov. 2015, Pages 337-344, each of which is incorporated herein by reference in its entirety.

[0457] In some embodiments, the guide polynucleotide comprises one or more modified nucleotides at the 5′ end and/or the 3′ end of the guide. In some embodiments, the guide polynucleotide comprises two, three, four or more modified nucleosides at the 5′ end and/or the 3′ end of the guide. In some embodiments, the guide polynucleotide comprises two, three, four or more modified nucleosides at the 5′ end and/or the 3′ end of the guide.

[0458] In some embodiments, the guide comprises at least about 50%-75% modified nucleotides. In some embodiments, the guide comprises at least about 85% or more modified nucleotides. In some embodiments, at least about 1-5 nucleotides at the 5′ end of the gRNA are modified and at least about 1-5 nucleotides at the 3′ end of the gRNA are modified. In some embodiments, at least about 3-5 contiguous nucleotides at each of the 5′ and 3′ termini of the gRNA are modified. In some embodiments, at least about 20% of the nucleotides present in a direct repeat or anti-direct repeat are modified. In some embodiments, at least about 50% of the nucleotides present in a direct repeat or anti-direct repeat are modified. In some embodiments, at least about 50-75% of the nucleotides present in a direct repeat or anti-direct repeat are modified. In some embodiments, at least about 100 of the nucleotides present in a direct repeat or anti-direct repeat are modified. In some embodiments, at least about 20% or more of the nucleotides present in a hairpin present in the gRNA scaffold are modified. In some embodiments, at least about 50% or more of the nucleotides present in a hairpin present in the gRNA scaffold are modified. In some embodiments, the guide comprises a variable length spacer. In some embodiments, the guide comprises a 20-40 nucleotide spacer. In some embodiments, the guide comprises a spacer comprising at least about 20-25 nucleotides or at least about 30-35 nucleotides. In some embodiments, the spacer comprises modified nucleotides. In some embodiments, the guide comprises two or more of the following:
[0459] at least about 1-5 nucleotides at the 5′ end of the gRNA are modified and at least about 1-5 nucleotides at the 3′ end of the gRNA are modified;
[0460] at least about 20% of the nucleotides present in a direct repeat or anti-direct repeat are modified;
[0461] at least about 50-75% of the nucleotides present in a direct repeat or anti-direct repeat are modified;
[0462] at least about 20% or more of the nucleotides present in a hairpin present in the gRNA scaffold are modified;
[0463] a variable length spacer; and
[0464] a spacer comprising modified nucleotides.

[0465] In embodiments, the gRNA contains numerous modified nucleotides and/or chemical modifications. Such modifications can increase base editing ˜2 fold in vivo or in vitro. In embodiments, the gRNA comprises 2′-O-methyl or phosphorothioate modifications. In an embodiment, the gRNA comprises 2′-O-methyl and phosphorothioate modifications. In an embodiment, the modifications increase base editing by at least about 2 fold.

[0466] A guide polynucleotide may comprise one or more modifications to provide a nucleic acid with a new or enhanced feature. A guide polynucleotide may comprise a nucleic acid affinity tag. A guide polynucleotide may comprise synthetic nucleotide, synthetic nucleotide analog, nucleotide derivatives, and/or modified nucleotides.

[0467] A gRNA or a guide polynucleotide can also be modified by 5′ adenylate, 5′ guanosine-triphosphate cap, 5′ N7-Methylguanosine-triphosphate cap, 5′ triphosphate cap, 3′ phosphate, 3′ thiophosphate, 5′ phosphate, 5′ thiophosphate, Cis-Syn thymidine dimer, trimers, C12 spacer, C3 spacer, C6 spacer, dSpacer, PC spacer, rSpacer, Spacer 18, Spacer 9, 3′-3′ modifications, 2′-O-methyl thioPACE (MSP), 2′-O-methyl-PACE (MP), and constrained ethyl (S-cEt), 5′-5′ modifications, abasic, acridine, azobenzene, biotin, biotin BB, biotin TEG, cholesteryl TEG, desthiobiotin TEG, DNP TEG, DNP-X, DOTA, dT-Biotin, dual biotin, PC biotin, psoralen C2, psoralen C6, TINA, 3′ DABCYL, black hole quencher 1, black hole quencher 2, DABCYL SE, dT-DABCYL, IRDye QC-1, QSY-21, QSY-35, QSY-7, QSY-9, carboxyl linker, thiol linkers, 2′-deoxyribonucleoside analog purine, 2′-deoxyribonucleoside analog pyrimidine, ribonucleoside analog, 2′-O-methyl ribonucleoside analog, sugar modified analogs, wobble/universal bases, fluorescent dye label, 2′-fluoro RNA, 2′-O-methyl RNA, methylphosphonate, phosphodiester DNA, phosphodiester RNA, phosphothioate DNA, phosphorothioate RNA, UNA, pseudouridine-5′-triphosphate, 5′-methylcytidine-5′-triphosphate, or any combination thereof.

[0468] In some cases, a phosphorothioate enhanced RNA gRNa can inhibit RNase A, RNase T1, calf serum nucleases, or any combinations thereof. These properties can allow the use of PS-RNA gRNAs to be used in applications where exposure to nucleases is of high probability in vivo or in vitro. For example, phosphorothioate (PS) bonds can be introduced between the last 3-5 nucleotides at the 5′- or 3′-end of a gRNA which can inhibit exonuclease degradation. In some cases, phosphorothioate bonds can be added throughout an entire gRNA to reduce attack by endonucleases.

### Fusion Proteins or Complexes Comprising a Nuclear Localization Sequence (NLS)

[0469] In some embodiments, the fusion proteins or complexes provided herein further comprise one or more (e.g., 2, 3, 4, 5) nuclear targeting sequences, for example a nuclear localization sequence (NLS). In one embodiment, a bipartite NLS is used. In some embodiments, a NLS comprises an amino acid sequence that facilitates the importation of a protein, that comprises an NLS, into the cell nucleus (e.g., by nuclear transport). In some embodiments, the NLS is fused to the N-terminus or the C-terminus of the fusion protein. In some embodiments, the NLS is fused to the C-terminus or N-terminus of an nCas9 domain or a dCas9 domain. In some embodiments, the NLS is fused to the N-terminus or C-terminus of the Cas12 domain. In some embodiments, the NLS is fused to the N-terminus or C-terminus of the cytidine or adenosine deaminase. In some embodiments, the NLS is fused to the fusion protein via one or more linkers. In some embodiments, the NLS is fused to the fusion protein without a linker. In some embodiments, the NLS comprises an amino acid sequence of any one of the NLS sequences provided or referenced herein. Additional nuclear localization sequences are known in the art and would be apparent to the skilled artisan. For example, NLS sequences are described in Plank et al., PCT/EP2000/011690, the contents of which are incorporated herein by reference for their disclosure of exemplary nuclear localization sequences.

[0470] In some embodiments, the NLS is present in a linker or the NLS is flanked by linkers, for example described herein. A bipartite NLS comprises two basic amino acid clusters, which are separated by a relatively short spacer sequence (hence bipartite—2 parts, while monopartite NLSs are not). The NLS of nucleoplasmin, KR[PAATKKAGQA]KKKK (SEQ ID NO: 191), is the prototype of the ubiquitous bipartite signal: two clusters of basic amino acids, separated by a spacer of about 10 amino acids. The sequence of an exemplary bipartite NLS follows:

(SEQ ID NO: 328)
PKKKRKVEGADKRTADGSEFESPKKKRKV.

[0471] In some embodiments, any of the fusion proteins or complexes provided herein comprise an NLS comprising the amino acid sequence EGADKRTADGSEFESPKKKRKV (amino acids 8 to 29 of SEQ ID NO 328). In some embodiments, any of the adenosine base editors provided herein comprise the amino acid sequence EGADKRTADGSEFESPKKKRKV (amino acids 8 to 29 of SEQ ID NO: 328). In some embodiments, the NLS is at a C-terminal portion of the adenosine base editor. In some embodiments, the NLS is at the C-terminus of the adenosine base editor.

### Additional Domains

[0472] A base editor described herein can include any domain which helps to facilitate the nucleobase editing, modification or altering of a nucleobase of a polynucleotide. In some embodiments, a base editor comprises a polynucleotide programmable nucleotide binding domain (e.g., Cas9), a nucleobase editing domain (e.g., deaminase domain), and one or more additional domains. In some embodiments, the additional domain can facilitate enzymatic or catalytic functions of the base editor, binding functions of the base editor, or be inhibitors of cellular machinery (e.g., enzymes) that could interfere with the desired base editing result. In some embodiments, a base editor comprises a nuclease, a nickase, a recombinase, a deaminase, a methyltransferase, a methylase, an acetylase, an acetyltransferase, a transcriptional activator, or a transcriptional repressor domain.

[0473] In some embodiments, a base editor comprises an uracil glycosylase inhibitor (UGI) domain. In some cases, a base editor is expressed in a cell in trans with a UGI polypeptide. In some embodiments, cellular DNA repair response to the presence of U: G heteroduplex DNA can be responsible for a reduction in nucleobase editing efficiency in cells. In such embodiments, uracil DNA glycosylase (UDG) can catalyze removal of U from DNA in cells, which can initiate base excision repair (BER), mostly resulting in reversion of the U: G pair to a C: G pair. In such embodiments, BER can be inhibited in base editors comprising one or more domains that bind the single strand, block the edited base, inhibit UGI, inhibit BER, protect the edited base, and/or promote repairing of the non-edited strand. Thus, this disclosure contemplates a base editor fusion protein or complex comprising a UGI domain and/or a uracil stabilizing protein (USP) domain.

### Base Editor System

[0474] Provided herein are systems, compositions, and methods for editing a nucleobase using a base editor system. In some embodiments, the base editor system comprises (1) a base editor (BE) comprising a polynucleotide programmable nucleotide binding domain and a nucleobase editing domain (e.g., a deaminase domain) for editing the nucleobase; and (2) a guide polynucleotide (e.g., guide RNA) in conjunction with the polynucleotide programmable nucleotide binding domain. In some embodiments, the base editor system is a cytidine base editor (CBE) or an adenosine base editor (ABE). In some embodiments, the polynucleotide programmable nucleotide binding domain is a polynucleotide programmable DNA or RNA binding domain. In some embodiments, the nucleobase editing domain is a deaminase domain. In some embodiments, a deaminase domain can be a cytidine deaminase or an cytosine deaminase. In some embodiments, a deaminase domain can be an adenine deaminase or an adenosine deaminase. In some embodiments, the adenosine base editor can deaminate adenine in DNA. In some embodiments, the base editor is capable of deaminating a cytidine in DNA.

[0475] Use of the base editor system provided herein comprises the steps of: (a) contacting a target nucleotide sequence of a polynucleotide (e.g., double- or single stranded DNA or RNA) of a subject with a base editor system comprising a nucleobase editor (e.g., an adenosine base editor or a cytidine base editor) and a guide polynucleotide (e.g., gRNA), wherein the target nucleotide sequence comprises a targeted nucleobase pair; (b) inducing strand separation of said target region; (c) converting a first nucleobase of said target nucleobase pair in a single strand of the target region to a second nucleobase; and (d) cutting no more than one strand of said target region, where a third nucleobase complementary to the first nucleobase base is replaced by a fourth nucleobase complementary to the second nucleobase. It should be appreciated that in some embodiments, step (b) is omitted. In some embodiments, said targeted nucleobase pair is a plurality of nucleobase pairs in one or more genes. In some embodiments, the base editor system provided herein is capable of multiplex editing of a plurality of nucleobase pairs in one or more genes. In some embodiments, the plurality of nucleobase pairs is located in the same gene. In some embodiments, the plurality of nucleobase pairs is located in one or more genes, wherein at least one gene is located in a different locus.

[0476] The components of a base editor system (e.g., a deaminase domain, a guide RNA, and/or a polynucleotide programmable nucleotide binding domain) may be associated with each other covalently or non-covalently. For example, in some embodiments, the deaminase domain can be targeted to a target nucleotide sequence by a polynucleotide programmable nucleotide binding domain, optionally where the polynucleotide programmable nucleotide binding domain is complexed with a polynucleotide (e.g., a guide RNA). In some embodiments, a polynucleotide programmable nucleotide binding domain can be fused or linked to a deaminase domain. In some embodiments, a polynucleotide programmable nucleotide binding domain can target a deaminase domain to a target nucleotide sequence by non-covalently interacting with or associating with the deaminase domain. For example, in some embodiments, the nucleobase editing component (e.g., the deaminase component) comprises an additional heterologous portion or domain that is capable of interacting with, associating with, or capable of forming a complex with a corresponding heterologous portion, antigen, or domain that is part of a polynucleotide programmable nucleotide binding domain and/or a guide polynucleotide (e.g., a guide RNA) complexed therewith. In some embodiments, the polynucleotide programmable nucleotide binding domain, and/or a guide polynucleotide (e.g., a guide RNA) complexed therewith, comprises an additional heterologous portion or domain that is capable of interacting with, associating with, or capable of forming a complex with a corresponding heterologous portion, antigen, or domain that is part of a nucleobase editing domain (e.g., the deaminase component). In some embodiments, the additional heterologous portion may be capable of binding to, interacting with, associating with, or forming a complex with a polypeptide. In some embodiments, the additional heterologous portion may be capable of binding to, interacting with, associating with, or forming a complex with a polynucleotide. In some embodiments, the additional heterologous portion may be capable of binding to a guide polynucleotide. In some embodiments, the additional heterologous portion may be capable of binding to a polypeptide linker. In some embodiments, the additional heterologous portion is capable of binding to a polynucleotide linker. An additional heterologous portion may be a protein domain. In some embodiments, an additional heterologous portion comprises a polypeptide, such as a 22 amino acid RNA-binding domain of the lambda bacteriophage antiterminator protein N (N22p), a 2G12 IgG homodimer domain, an ABI, an antibody (e.g. an antibody that binds a component of the base editor system or a heterologous portion thereof) or fragment thereof (e.g. heavy chain domain 2 (CH₂) of IgM (MHD2) or IgE (EHD2), an immunoglobulin Fc region, a heavy chain domain 3 (CH3) of IgG or IgA, a heavy chain domain 4 (CH4) of IgM or IgE, an Fab, an Fab2, miniantibodies, and/or ZIP antibodies), a barnase-barstar dimer domain, a Bcl-xL domain, a Calcineurin A (CAN) domain, a Cardiac phospholamban transmembrane pentamer domain, a collagen domain, a Com RNA binding protein domain (e.g. SfMu Com coat protein domain, and SfMu Com binding protein domain), a Cyclophilin-Fas fusion protein (CyP-Fas) domain, a Fab domain, an Fc domain, a fibritin foldon domain, an FK506 binding protein (FKBP) domain, an FKBP binding domain (FRB) domain of mTOR, a foldon domain, a fragment X domain, a GAI domain, a GID1 domain, a Glycophorin A transmembrane domain, a GyrB domain, a Halo tag, an HIV Gp41 trimerisation domain, an HPV45 oncoprotein E7 C-terminal dimer domain, a hydrophobic polypeptide, a K Homology (KH) domain, a Ku protein domain (e.g., a Ku heterodimer), a leucine zipper, a LOV domain, a mitochondrial antiviral-signaling protein CARD filament domain, an MS2 coat protein domain (MCP), a non-natural RNA aptamer ligand that binds a corresponding RNA motif/aptamer, a parathyroid hormone dimerization domain, a PP7 coat protein (PCP) domain, a PSD95-Dlgl-zo-1 (PDZ) domain, a PYL domain, a SNAP tag, a SpyCatcher moiety, a SpyTag moiety, a streptavidin domain, a streptavidin-binding protein domain, a streptavidin binding protein (SBP) domain, a telomerase Sm7 protein domain (e.g. Sm7 homoheptamer or a monomeric Sm-like protein), and/or fragments thereof. In embodiments, an additional heterologous portion comprises a polynucleotide (e.g., an RNA motif), such as an MS2 phage operator stem-loop (e.g., an MS2, an MS2 C-5 mutant, or an MS2 F-5 mutant), a non-natural RNA motif, a PP7 operator stem-loop, an SfMu phate Com stem-loop, a steril alpha motif, a telomerase Ku binding motif, a telomerase Sm7 binding motif, and/or fragments thereof. Non-limiting examples of additional heterologous portions include polypeptides with at least about 85% sequence identity to any one or more of SEQ ID NOs: 380, 382, 384, 386-388, or fragments thereof. Non-limiting examples of additional heterologous portions include polynucleotides with at least about 85% sequence identity to any one or more of SEQ ID NOs: 379, 381, 383, 385, or fragments thereof.

[0477] In some instances, components of the base editing system are associated with one another through the interaction of leucine zipper domains (e.g., SEQ ID NOs: 387 and 388). In some cases, components of the base editing system are associated with one another through polypeptide domains (e.g., FokI domains) that associate to form protein complexes containing about, at least about, or no more than about 1, 2 (i.e., dimerize), 3, 4, 5, 6, 7, 8, 9, 10 polypeptide domain units, optionally the polypeptide domains may include alterations that reduce or eliminate an activity thereof.

[0478] In some instances, components of the base editing system are associated with one another through the interaction of multimeric antibodies or fragments thereof (e.g., IgG, IgD, IgA, IgM, IgE, a heavy chain domain 2 (CH2) of IgM (MHD2) or IgE (EHD2), an immunoglobulin Fc region, a heavy chain domain 3 (CH3) of IgG or IgA, a heavy chain domain 4 (CH4) of IgM or IgE, an Fab, and an Fab2). In some instances, the antibodies are dimeric, trimeric, or tetrameric. In embodiments, the dimeric antibodies bind a polypeptide or polynucleotide component of the base editing system.

[0479] In some cases, components of the base editing system are associated with one another through the interaction of a polynucleotide-binding protein domain(s) with a polynucleotide(s). In some instances, components of the base editing system are associated with one another through the interaction of one or more polynucleotide-binding protein domains with polynucleotides that are self-complementary and/or complementary to one another so that complementary binding of the polynucleotides to one another brings into association their respective bound polynucleotide-binding protein domain(s).

[0480] In some instances, components of the base editing system are associated with one another through the interaction of a polypeptide domain(s) with a small molecule(s) (e.g., chemical inducers of dimerization (CIDs), also known as “dimerizers”). Non-limiting examples of CIDs include those disclosed in Amara, et al., “A versatile synthetic dimerizer for the regulation of protein-protein interactions,” PNAS, 94:10618-10623 (1997); and Voß, et al. “Chemically induced dimerization: reversible and spatiotemporal control of protein function in cells,” Current Opinion in Chemical Biology, 28:194-201 (2015), the disclosures of each of which are incorporated herein by reference in their entireties for all purposes. In some embodiments, the base editor inhibits base excision repair (BER) of the edited strand. In some embodiments, the base editor protects or binds the non-edited strand. In some embodiments, the base editor comprises UGI activity or USP activity. In some embodiments, the base editor comprises a catalytically inactive inosine-specific nuclease.

[0481] The base editors of the present disclosure may comprise any domain, feature or amino acid sequence which facilitates the editing of a target polynucleotide sequence. For example, in some embodiments, the base editor comprises a nuclear localization sequence (NLS). In some embodiments, an NLS of the base editor is localized between a deaminase domain and a polynucleotide programmable nucleotide binding domain. In some embodiments, an NLS of the base editor is localized C-terminal to a polynucleotide programmable nucleotide binding domain.

[0482] Protein domains included in the fusion protein can be a heterologous functional domain. Non-limiting examples of protein domains which can be included in the fusion protein include a deaminase domain (e.g., cytidine deaminase and/or adenosine deaminase), a uracil glycosylase inhibitor (UGI) domain, epitope tags, and reporter gene sequences.

[0483] In some embodiments, the adenosine base editor (ABE) can deaminate adenine in DNA. In some embodiments, ABE is generated by replacing APOBEC1 component of BE3 with natural or engineered E. coli TadA, human ADAR2, mouse ADA, or human ADAT2. In some embodiments, ABE comprises an evolved TadA variant. In some embodiments, the base editor is ABE8.1, which comprises or consists essentially of the following sequence or a fragment thereof having adenosine deaminase activity: SEQ ID NO: 331. Other ABE8 sequences are provided in the attached sequence listing (SEQ ID NOs: 332-354).

[0484] In some embodiments, the base editor includes an adenosine deaminase variant comprising an amino acid sequence, which contains alterations relative to an ABE 7*10 reference sequence, as described herein. The term “monomer” as used in Table 7 refers to a monomeric form of TadA*7.10 comprising the alterations described. The term “heterodimer” as used in Table 7 refers to the specified wild-type E. coli TadA adenosine deaminase fused to a TadA*7.10 comprising the alterations as described.

TABLE 7
Adenosine Deaminase Base Editor Variants

| | Adenosine | |
|---|---|---|
| ABE | Deaminase | Adenosine Deaminase Description |
| ABE-605m | MSP605 | monomer_TadA*7.10 + V82G + Y147T + Q154S |
| ABE-680m | MSP680 | monomer_TadA*7.10 + I76Y + V82G + Y147T + Q154S |
| ABE-823m | MSP823 | monomer_TadA*7.10 + L36H + V82G + Y147T + Q154S + |
| | | N157K |
| ABE-824m | MSP824 | monomer_TadA*7.10 + V82G + Y147D + F149Y + Q154S + |
| | | D167N |
| ABE-825m | MSP825 | monomer_TadA*7.10 + L36H + V82G+ Y147D + F149Y + |
| | | Q154S + N157K + D167N |
| ABE-827m | MSP827 | monomer_TadA*7.10 + L36H + I76Y + V82G + Y147T + |
| | | Q154S + N157K |
| ABE-828m | MSP828 | monomer_TadA*7.10 + I76Y + V82G + Y147D + F149Y + |
| | | Q154S + D167N |
| ABE-829m | MSP829 | monomer_TadA*7.10 + L36H + I76Y + V82G + Y147D + |
| | | F149Y + Q154S + N157K + D167N |
| ABE-605d | MSP605 | heterodimer_(WT) + (TadA*7.10 + V82G + Y147T + Q154S) |
| ABE-680d | MSP680 | heterodimer_(WT) + (TadA*7.10 + I76Y + V82G + Y147T + |
| | | Q154S) |
| ABE-823d | MSP823 | heterodimer_(WT) + (TadA*7.10 + L36H + V82G + Y147T + |
| | | Q154S + N157K) |
| ABE-824d | MSP824 | heterodimer_(WT) + (TadA*7.10 + V82G + Y147D + F149Y + |
| | | Q154S + D167N) |
| ABE-825d | MSP825 | heterodimer_(WT) + (TadA*7.10 + L36H + V82G + Y147D + |
| | | F149Y + Q154S + N157K + D167N) |
| ABE-827d | MSP827 | heterodimer_(WT) + (TadA*7.10 + L36H + I76Y + V82G + |
| | | Y147T + Q154S + N157K) |
| ABE-828d | MSP828 | heterodimer_(WT) + (TadA*7.10 + I76Y + V82G + Y147D + |
| | | F149Y + Q154S + D167N) |
| ABE-829d | MSP829 | heterodimer_(WT) + (TadA*7.10 + L36H + I76Y + V82G + |
| | | Y147D + F149Y + Q154S + N157K + D167N) |

[0485] In some embodiments, the base editor comprises a domain comprising all or a portion (e.g., a functional portion) of a uracil glycosylase inhibitor (UGI) or a uracil stabilizing protein (USP) domain.

### Linkers

[0486] In certain embodiments, linkers may be used to link any of the peptides or peptide domains of the disclosure. The linker may be as simple as a covalent bond, or it may be a polymeric linker many atoms in length. In certain embodiments, the linker is a polypeptide or based on amino acids. In other embodiments, the linker is not peptide-like. In certain embodiments, the linker is a covalent bond (e.g., a carbon-carbon bond, disulfide bond, carbon-heteroatom bond, etc.).

[0487] In some embodiments, any of the fusion proteins provided herein, comprise a cytidine or adenosine deaminase and a Cas9 domain that are fused to each other via a linker. Various linker lengths and flexibilities between the cytidine or adenosine deaminase and the Cas9 domain can be employed (e.g., ranging from very flexible linkers of the form (GGGS) n (SEQ ID NO: 246), (GGGGS)n (SEQ ID NO: 247), and (G) n to more rigid linkers of the form (EAAAK) n (SEQ ID NO: 248), (SGGS)n (SEQ ID NO: 355), SGSETPGTSESATPES (SEQ ID NO: 249) (see, e.g., Guilinger J P, et al. Fusion of catalytically inactive Cas9 to FokI nuclease improves the specificity of genome modification. Nat. Biotechnol. 2014; 32(6): 577-82; the entire contents are incorporated herein by reference) and (XP)n) in order to achieve the optimal length for activity for the cytidine or adenosine deaminase nucleobase editor. In some embodiments, n is 1, 2, 3, 4, 5, 6, 7, 8, 9, 10, 11, 12, 13, 14, or 15. In some embodiments, the linker comprises a (GGS)n motif, wherein n is 1, 3, or 7. In some embodiments, cytidine deaminase or adenosine deaminase and the Cas9 domain of any of the fusion proteins provided herein are fused via a linker comprising the amino acid sequence SGSETPGTSESATPES (SEQ ID NO: 249), which can also be referred to as the XTEN linker.

[0488] In some embodiments, the domains of the base editor are fused via a linker that comprises the amino acid sequence of:

(SEQ ID NO: 356)
SGGSSGSETPGTSESATPESSGGS,
(SEQ ID NO: 357)
SGGSSGGSSGSETPGTSESATPESSGGSSGGS,
or
(SEQ ID NO: 358)
GGSGGSPGSPAGSPTSTEEGTSESATPESGPGTSTEPSEGSAPGSPAGS
PTSTEEGTSTEPSEGSAPGTSTEPSEGSAPGTSESATPESGPGSEPATS
GGSGGS.

[0489] In some embodiments, domains of the base editor are fused via a linker comprising the amino acid sequence SGSETPGTSESATPES (SEQ ID NO: 249), which may also be referred to as the XTEN linker. In some embodiments, a linker comprises the amino acid sequence SGGS (SEQ ID NO: 355). In some embodiments, the linker is 24 amino acids in length. In some embodiments, the linker comprises the amino acid sequence SGGSSGGSSGSETPGTSESATPES (SEQ ID NO: 359). In some embodiments, the linker is 40 amino acids in length. In some embodiments, the linker comprises the amino acid sequence: SGGSSGGSSGSETPGTSESATPESSGGSSGGSSGGSSGGS (SEQ ID NO: 360). In some embodiments, the linker is 64 amino acids in length. In some embodiments, the linker comprises the amino acid sequence: SGGSSGGSSGSETPGTSESATPESSGGSSGGSSGGSSGGSSGSETPGTSESATPESSGGSSGGS (SEQ ID NO: 361). In some embodiments, the linker is 92 amino acids in length. In some embodiments, the linker comprises the amino acid sequence:

(SEQ ID NO: 362)
PGSPAGSPTSTEEGTSESATPESGPGTSTEPSEGSAPGSPAGSPTSTEE
GTSTEPSEGSAPGTSTEPSEGSAPGTSESATPESGPGSEPATS.

In some embodiments, a linker comprises a plurality of proline residues and is 5-21, 5-14, 5-9, 5-7 amino acids in length, e.g., PAPAP (SEQ ID NO: 363), PAPAPA (SEQ ID NO: 364), PAPAPAP (SEQ ID NO: 365), PAPAPAPA (SEQ ID NO: 366), P(AP)4 (SEQ ID NO: 367), P(AP)7 (SEQ ID NO: 368), P(AP)10 (SEQ ID NO: 369) (see, e.g., Tan J, Zhang F, Karcher D, Bock R. Engineering of high-precision base editors for site-specific single nucleotide replacement. Nat Commun. 2019 Jan. 25; 10(1):439; the entire contents are incorporated herein by reference). Such proline-rich linkers are also termed “rigid” linkers.
Nucleic Acid Programmable DNA Binding Proteins with Guide RNAs

[0490] Provided herein are compositions and methods for base editing in cells. Further provided herein are compositions comprising a guide polynucleotide sequence, e.g., a guide RNA sequence, or a combination of 2, 3, 4, 5, 6, 7, 8, 9, 10, 11, 12, 13, 14, 15, 16, 17, 18, 19, 20, or more guide RNAs as provided herein. In some embodiments, a composition for base editing as provided herein further comprises a polynucleotide that encodes a base editor, e.g., a C-base editor or an A-base editor. For example, a composition for base editing may comprise a mRNA sequence encoding a BE, a BE4, an ABE, and a combination of one or more guide RNAs as provided. A composition for base editing may comprise a base editor polypeptide and a combination of one or more of any guide RNAs provided herein. Such a composition may be used to effect base editing in a cell through different delivery approaches, for example, electroporation, nucleofection, viral transduction or transfection. In some embodiments, the composition for base editing comprises an mRNA sequence that encodes a base editor and a combination of one or more guide RNA sequences provided herein for electroporation.

[0491] Some aspects of this disclosure provide systems comprising any of the fusion proteins or complexes provided herein, and a guide RNA bound to a nucleic acid programmable DNA binding protein (napDNAbp) domain (e.g., a Cas9 (e.g., a dCas9, a nuclease active Cas9, or a Cas9 nickase) or Cas12) of the fusion protein or complex. These complexes are also termed ribonucleoproteins (RNPs). In some embodiments, the guide nucleic acid (e.g., guide RNA) is from 15-100 nucleotides long and comprises a sequence of at least 10 contiguous nucleotides that is complementary to a target sequence. In some embodiments, the target sequence is a DNA sequence. In some embodiments, the target sequence is an RNA sequence. In some embodiments, the target sequence is a sequence in the genome of a bacteria, yeast, fungi, insect, plant, or animal. In some embodiments, the target sequence is a sequence in the genome of a human. In some embodiments, the 3′ end of the target sequence is immediately adjacent to a canonical PAM sequence (NGG). In some embodiments, the 3′ end of the target sequence is immediately adjacent to a non-canonical PAM sequence (e.g., a sequence listed in Table 3 or 5′-NAA-3′). In some embodiments, the guide nucleic acid (e.g., guide RNA) is complementary to a sequence in a gene of interest (e.g., a gene associated with a disease or disorder).

[0492] Some aspects of this disclosure provide methods of using the fusion proteins, or complexes provided herein. For example, some aspects of this disclosure provide methods comprising contacting a DNA molecule with any of the fusion proteins or complexes provided herein, and with at least one guide RNA, wherein the guide RNA is about 15-100 nucleotides long and comprises a sequence of at least 10 contiguous nucleotides that is complementary to a target sequence.

[0493] The domains of the base editor disclosed herein can be arranged in any order.

[0494] A defined target region can be a deamination window. A deamination window can be the defined region in which a base editor acts upon and deaminates a target nucleotide. In some embodiments, the deamination window is within a 2, 3, 4, 5, 6, 7, 8, 9, or 10 base regions. In some embodiments, the deamination window is 5, 6, 7, 8, 9, 10, 11, 12, 13, 14, 15, 16, 17, 18, 19, 20, 21, 22, 23, 24, or 25 bases upstream of the PAM.

[0495] The base editors of the present disclosure may comprise any domain, feature or amino acid sequence which facilitates the editing of a target polynucleotide sequence.

### Methods of Using Fusion Proteins or Complexes Comprising a Cytidine or Adenosine Deaminase and a Cas9 Domain

[0496] Some aspects of this disclosure provide methods of using the fusion proteins, or complexes provided herein. For example, some aspects of this disclosure provide methods comprising contacting a DNA molecule with any of the fusion proteins or complexes provided herein, and with at least one guide RNA described herein.

[0497] In some embodiments, a fusion protein or complex of the disclosure is used for editing a target gene of interest. In particular, a cytidine deaminase or adenosine deaminase nucleobase editor described herein is capable of making multiple mutations within a target sequence. These mutations may affect the function of the target. For example, when a cytidine deaminase or adenosine deaminase nucleobase editor is used to target a regulatory region the function of the regulatory region is altered and the expression of the downstream protein is reduced or eliminated.

### Base Editor Efficiency

[0498] In some embodiments, the purpose of the methods provided herein is to alter a gene and/or gene product via gene editing. The nucleobase editing proteins provided herein can be used for gene editing-based human therapeutics in vitro or in vivo. It will be understood by the skilled artisan that the nucleobase editing proteins provided herein, e.g., the fusion proteins or complexes comprising a polynucleotide programmable nucleotide binding domain (e.g., Cas9) and a nucleobase editing domain (e.g., an adenosine deaminase domain or a cytidine deaminase domain) can be used to edit a nucleotide from A to G or C to T.

[0499] Advantageously, base editing systems as provided herein provide genome editing without generating double-strand DNA breaks, without requiring a donor DNA template, and without inducing an excess of stochastic insertions and deletions as CRISPR may do. In some embodiments, the present disclosure provides base editors that efficiently generate an intended mutation, such as a STOP codon, in a nucleic acid (e.g., a nucleic acid within a genome of a subject) without generating a significant number of unintended mutations, such as unintended point mutations.

[0500] The base editors of the disclosure advantageously modify a specific nucleotide base encoding a protein without generating a significant proportion of indels (i.e., insertions or deletions). Such indels can lead to frame shift mutations within a coding region of a gene.

[0501] In some embodiments, the base editors provided herein are capable of generating a ratio of intended mutations to indels (i.e., intended point mutations: unintended point mutations) that is greater than 1:1. In some embodiments, the base editors provided herein are capable of generating a ratio of intended mutations to indels that is at least 1.5:1, at least 2:1, at least 2.5:1, at least 3:1, at least 3.5:1, at least 4:1, at least 4.5:1, at least 5:1, at least 5.5:1, at least 6:1, at least 6.5:1, at least 7:1, at least 7.5:1, at least 8:1, at least 10:1, at least 12:1, at least 15:1, at least 20:1, at least 25:1, at least 30:1, at least 40:1, at least 50:1, at least 100:1, at least 200:1, at least 300:1, at least 400:1, at least 500:1, at least 600:1, at least 700:1, at least 800:1, at least 900:1, or at least 1000:1, or more. The number of intended mutations and indels may be determined using any suitable method.

[0502] In some embodiments, the base editors provided herein can limit formation of indels in a region of a nucleic acid. In some embodiments, the region is at a nucleotide targeted by a base editor or a region within 2, 3, 4, 5, 6, 7, 8, 9, or 10 nucleotides of a nucleotide targeted by a base editor. In some embodiments, any of the base editors provided herein can limit the formation of indels at a region of a nucleic acid to less than 1%, less than 1.5%, less than 2%, less than 2.5%, less than 3%, less than 3.5%, less than 4%, less than 4.5%, less than 5%, less than 6%, less than 7%, less than 8%, less than 9%, less than 10%, less than 12%, less than 15%, or less than 20%.

[0503] Base editing is often referred to as a “modification”, such as, a genetic modification, a gene modification and modification of the nucleic acid sequence and is clearly understandable based on the context that the modification is a base editing modification. A base editing modification is therefore a modification at the nucleotide base level, for example as a result of the deaminase activity discussed throughout the disclosure, which then results in a change in the gene sequence and may affect the gene product.

[0504] In some embodiments, the modification, e.g., single base edit results in about or at least about a 10%, 15%, 20%, 25%, 30%, 35%, 40%, 45%, 50%, 55%, 60%, 65%, 70%, 75%, 80%, 85%, 90%, 95%, 99%, or 100% reduction, or reduction to an undetectable level, of the gene targeted expression.

[0505] The disclosure provides adenosine deaminase variants (e.g., ABE8 variants) that have increased efficiency and specificity. In particular, the adenosine deaminase variants described herein are more likely to edit a desired base within a polynucleotide and are less likely to edit bases that are not intended to be altered (e.g., “bystanders”).

[0506] In some embodiments, any of the base editing system comprising one of the ABE8 base editor variants described herein has reduced bystander editing or mutations by at least 1%, 2%, 3%, 4%, 5%, 10%, 15%, 20%, 25%, 30%, 35%, 40%, 45%, 50%, 55%, 60%, 65%, 70%, 75%, 80%, 85%, 90%, 95%, or 99% compared to a base editor system comprising an ABE7 base editor, e.g., ABE7.10.

[0507] In some embodiments, any of the ABE8 base editor variants described herein has higher base editing efficiency compared to the ABE7 base editors. In some embodiments, any of the ABE8 base editor variants described herein have at least 1%, 2%, 3%, 4%, 5%, 10%, 15%, 20%, 25%, 30%, 35%, 40%, 45%, 50%, 55%, 60%, 65%, 70%, 75%, 80%, 85%, 90%, 95%, 99%, 100%, 105%, 110%, 115%, 120%, 125%, 130%, 135%, 140%, 145%, 150%, 155%, 160%, 165%, 170%, 175%, 180%, 185%, 190%, I95%, 200%, 210%, 220%, 230%, 240%, 250%, 260%, 270%, 280%, 290%, 300%, 310%, 320%, 330%, 340%, 350%, 360%, 370%, 380%, 390%, 400%, 450%, or 500% higher base editing efficiency compared to an ABE7 base editor, e.g., ABE7.10.

[0508] The ABE8 base editor variants described herein may be delivered to a host cell via a plasmid, a vector, a LNP complex, or an mRNA. In some embodiments, any of the ABE8 base editor variants described herein is delivered to a host cell as an mRNA.

[0509] In some embodiments, the method described herein, for example, the base editing methods has minimum to no off-target effects. In some embodiments, the method described herein, for example, the base editing methods, has minimal to no chromosomal translocations.

[0510] In some embodiments, the base editing method described herein results in about 91%, 92%, 93%, 94%, 95%, 96%, 97%, 98%, 99% or 100% of a cell population that have been successfully edited.

[0511] In some embodiments, the percent of viable cells in a cell population following a base editing intervention is greater than at least 60%, 70%, 80%, or 90% of the starting cell population at the time of the base editing event. In some embodiments, the percent of viable cells in a cell population following editing is about 70%. In some embodiments, the percent of viable cells in a cell population following editing is about 75%. In some embodiments, the percent of viable cells in a cell population following editing is about 80%. In some embodiments, the percent of viable cells in a cell population as described above is about 85%. In some embodiments, the percent of viable cells in a cell population as described above is about 90%, or about 91%, 92%, 93%, 94% 95%, 96%, 97%, 98%, 99%, or 100% of the cells in the population at the time of the base editing event.

[0512] In embodiments, the cell population is a population of cells contacted with a base editor, complex, or base editor system of the present disclosure.

[0513] The number of intended mutations and indels can be determined using any suitable method, for example, as described in International PCT Application Nos. PCT/US2017/045381 (WO2018/027078) and PCT/US2016/058344 (WO2017/070632); Komor, A. C., et al., “Programmable editing of a target base in genomic DNA without double-stranded DNA cleavage” Nature 533, 420-424 (2016); Gaudelli, N. M., et al., “Programmable base editing of A•T to G•C in genomic DNA without DNA cleavage” Nature 551, 464-471 (2017); and Komor, A. C., et al., “Improved base excision repair inhibition and bacteriophage Mu Gam protein yields C:G-to-T:A base editors with higher efficiency and product purity” Science Advances 3:eaao4774 (2017); the entire contents of which are hereby incorporated by reference.

[0514] In some embodiments, to calculate indel frequencies, sequencing reads are scanned for exact matches to two 10-bp sequences that flank both sides of a window in which indels can occur. If no exact matches are located, the read is excluded from analysis. If the length of this indel window exactly matches the reference sequence the read is classified as not containing an indel. If the indel window is two or more bases longer or shorter than the reference sequence, then the sequencing read is classified as an insertion or deletion, respectively. In some embodiments, the base editors provided herein can limit formation of indels in a region of a nucleic acid. In some embodiments, the region is at a nucleotide targeted by a base editor or a region within 2, 3, 4, 5, 6, 7, 8, 9, or 10 nucleotides of a nucleotide targeted by a base editor.

### Multiplex Editing

[0515] In some embodiments, the base editor system provided herein is capable of multiplex editing of a plurality of nucleobase pairs in one or more genes or polynucleotide sequences. In some embodiments, the plurality of nucleobase pairs is located in the same gene or in one or more genes, wherein at least one gene is located in a different locus. In some embodiments, the multiplex editing comprises one or more guide polynucleotides. In some embodiments, the multiplex editing comprises one or more base editor systems. In some embodiments, the multiplex editing comprises one or more base editor systems with a single guide polynucleotide or a plurality of guide polynucleotides. In some embodiments, the multiplex editing comprises one or more guide polynucleotides with a single base editor system. It should be appreciated that the characteristics of the multiplex editing using any of the base editors as described herein can be applied to any combination of methods using any base editor provided herein. It should also be appreciated that the multiplex editing using any of the base editors as described herein may comprise a sequential editing of a plurality of nucleobase pairs.

[0516] In some embodiments, the base editor system capable of multiplex editing of a plurality of nucleobase pairs in one or more genes comprises one of ABE7, ABE8, and/or ABE9 base editors.

### Expression of Polypeptides in a Host Cell

[0517] Polypeptides of the present disclosure may be expressed in virtually any host cell of interest, including mammalian cells (e.g., human cells). In some embodiments, the host cell is an immune cell (e.g., T-, or NK-cell). In some embodiments, the host cell is an allogeneic immune cell (e.g., T- or NK-cell). In some embodiments, the host cell is a CAR-T cell.

[0518] An expression vector containing a DNA encoding a nucleic acid sequence-recognizing module and/or a nucleic acid base converting enzyme can be produced, for example, by linking the DNA to the downstream of a promoter in a suitable expression vector.

[0519] In some embodiments, the nucleic acid sequence is inserted into the genome of the cell (e.g., T cell or NK cell) by introducing a vector, for example, a viral or non-viral vector, comprising the nucleic acid. Examples of viral vectors include, but are not limited to, adeno-associated viral (AAV) vectors, retroviral vectors or lentiviral vectors. In some embodiments, the lentiviral vector is an integrase-deficient lentiviral vector. In some embodiments, the nucleic acid sequence is inserted into the genome of the cell (e.g., T cell) via non-viral delivery. In non-viral delivery methods, the nucleic acid can be naked DNA, or in a non-viral plasmid or vector.

[0520] Regarding the promoter to be used, any promoter appropriate for a host to be used for gene expression can be used. For example, when the host is an animal cell, an SRα promoter, SV40 promoter, LTR promoter, cytomegalovirus (CMV) promoter, Rous sarcoma virus (RSV) promoter, Moloney mouse leukemia virus (MoMuLV), LTR, herpes simplex virus thymidine kinase (HSV-TK), MND (a synthetic promoter that contains the U3 region of a modified MoMuLV LTR with myeloproliferative sarcoma virus enhancer) promoter, and the like can be used. Of these, CMV promoter, SR.alpha. promoter and the like.

### Delivery Systems

### Nucleic Acid-Based Delivery of Base Editor Systems

[0521] Nucleic acid molecules encoding a base editor system according to the present disclosure can be administered to subjects or delivered into cells in vitro or in vivo by art-known methods or as described herein. For example, a base editor system comprising a deaminase (e.g., cytidine or adenine deaminase) can be delivered by vectors (e.g., viral or non-viral vectors), or by naked DNA, DNA complexes, lipid nanoparticles, or a combination of the aforementioned compositions. A base editor system may be delivered to a cell using any methods available in the art including, but not limited to, physical methods (e.g., electroporation, particle gun, calcium phosphate transfection), viral methods, non-viral methods (e.g., liposomes, cationic methods, lipid nanoparticles, polymeric nanoparticles), or biological non-viral methods (e.g., attenuated bacterial, engineered bacteriophages, mammalian virus-like particles, biological liposomes, erythrocyte ghosts, exosomes).

[0522] Nanoparticles, which can be organic or inorganic, are useful for delivering a base editor system or component thereof. Nanoparticles are well known in the art and any suitable nanoparticle can be used to deliver a base editor system or component thereof, or a nucleic acid molecule encoding such components. In one example, organic (e.g., lipid and/or polymer) nanoparticles are suitable for use as delivery vehicles in certain embodiments of this disclosure. Non-limiting examples of lipid nanoparticles suitable for use in the methods of the present disclosure include those described in International Patent Application Publications No. WO2022140239, WO2022140252, WO2022140238, WO2022159421, WO2022159472, WO2022159475, WO2022159463, WO2021113365, and WO2021141969, the disclosures of each of which is incorporated herein by reference in its entirety for all purposes.

### Viral Vectors

[0523] A base editor described herein can be delivered with a viral vector. In some embodiments, a base editor disclosed herein can be encoded on a nucleic acid that is contained in a viral vector. In some embodiments, one or more components of the base editor system can be encoded on one or more viral vectors. Non-limiting examples of viral vectors include lentivirus (e.g., HIV and FIV-based vectors), Adenovirus (e.g., AD100), rabies virus (see, e.g., U.S. Patent Application Publication No. US 2022/0290164 A1, the disclosure of which is incorporated herein by reference in its entirety for all purposes), retrovirus (e.g., Maloney murine leukemia virus, MML-V), herpesvirus vectors (e.g., HSV-2), and Adeno-associated viruses (AAVs), or other plasmid or viral vector types.

### Non-Viral Platforms for Gene Transfer

[0524] Non-viral platforms for introducing a heterologous polynucleotide into a cell of interest are known in the art.

[0525] For example, the disclosure provides a method of inserting a heterologous polynucleotide into the genome of a cell using a Cas9 or Cas12 (e.g., Cas12b) ribonucleoprotein complex (RNP)-DNA template complex where an RNP including a Cas9 or Cas12 nuclease domain and a guide RNA, wherein the guide RNA specifically hybridizes to a target region of the genome of the cell, and wherein the Cas9 nuclease domain cleaves the target region to create an insertion site in the genome of the cell. A DNA template is then used to introduce a heterologous polynucleotide. In embodiments, the DNA template is a double-stranded or single-stranded DNA template, wherein the size of the DNA template is about 200 nucleotides or is greater than about 200 nucleotides, wherein the 5′ and 3′ ends of the DNA template comprise nucleotide sequences that are homologous to genomic sequences flanking the insertion site. In some embodiments, the DNA template is a single-stranded circular DNA template. In embodiments, the molar ratio of RNP to DNA template in the complex is from about 3:1 to about 100:1.

[0526] In some embodiments, the DNA template is a linear DNA template. In some examples, the DNA template is a single-stranded DNA template. In certain embodiments, the single-stranded DNA template is a pure single-stranded DNA template. In some embodiments, the single stranded DNA template is a single-stranded oligodeoxynucleotide (ssODN).

[0527] In other embodiments, a single-stranded DNA (ssDNA) can produce efficient homology directed repair (HDR) with minimal off-target integration. In one embodiment, an ssDNA phage is used to efficiently and inexpensively produce long circular ssDNA (cssDNA) donors. These cssDNA donors serve as efficient HDR templates when used with Cas9 or Cas12 (e.g., Cas12a, Cas12b), with integration frequencies superior to linear ssDNA (ssDNA) donors.

[0528] In some embodiments, a heterologous polynucleotide may be inserted into the genome of a cell using a transposable element such as a transposon, as described, for example, in Tipanee, et al. Human Gene Therapy, November 2017, 1087-1104, DOI: 10.1089/hum.2017.128. Transposable elements are divided into two categories: retrotransposons and DNA transposons. Transposable elements can alter the genome of the host cells through insertions, duplications, deletions, and translocations. Retrotransposons are described as mobile elements that employ an RNA intermediate that is first reverse transcribed into a complementary single-stranded (c) DNA strand by a reverse transcriptase encoded by the retrotransposon. Subsequently, the single-stranded DNA is converted into a double-stranded DNA that then integrates into the host genome. This so-called “replicative mechanism” yields several new copies of retrotransposons expanding throughout the target genome over evolutionary time. Retrotransposons are categorized into many subtypes according to the DNA sequences of the long terminal repeats and its open reading frames. Retrotransposons were employed to enable transgene integration into the target cell DNA, in some cases relying on adenoviral delivery. Alternatively, DNA transposons translocate via a “non-replicative mechanism,” whereby two Terminal Inverted Repeats (TIRs) are recognized and cleaved by a transposase enzyme, releasing the cognate DNA transposons with free DNA ends. The excised DNA transposons then integrate into a new genomic region where target sites are recognized and cut by the same transposase. This cut-and-paste mechanism usually duplicates DNA target sites upon insertion, leaving target site duplications (TSDs). Non-limiting examples of transposons include the Sleeping Beauty (SB) transposon, the piggyBac (PB) transposon, and Tol2 transposable elements. In various embodiments, a transposase is used to edit a polynucleotide so as to disrupt expression of a polypeptide (e.g., an FKBP1A polypeptide) encoded by the polynucleotide. For example, a transposase may be used in some embodiments to insert a heterologous polynucleotide within a polynucleotide encoding a polypeptide (e.g., an FKBP1A gene) to disrupt expression of the polypeptide encoded by the polynucleotide. In some instances, a transposon may be used to introduce an insertion or deletion mutation to a polynucleotide, thereby disrupting expression of a polypeptide encoded by the polynucleotide.

### Inteins

[0529] Inteins (intervening protein) are auto-processing domains found in a variety of diverse organisms, which carry out a process known as protein splicing.

[0530] Non-limiting examples of inteins include any intein or intein-pair known in the art, which include a synthetic intein based on the dnaE intein, the Cfa-N (e.g., split intein-N) and Cfa-C (e.g., split intein-C) intein pair, has been described (e.g., in Stevens et al., J Am Chem Soc. 2016 Feb. 24; 138(7):2162-5, incorporated herein by reference), and DnaE. Non-limiting examples of pairs of inteins that may be used in accordance with the present disclosure include: Cfa DnaE intein, Ssp GyrB intein, Ssp DnaX intein, Ter DnaE3 intein, Ter ThyX intein, Rma DnaB intein and Cne Prp8 intein (e.g., as described in U.S. Pat. No. 8,394,604, incorporated herein by reference). Exemplary nucleotide and amino acid sequences of inteins are provided in the Sequence Listing at SEQ ID NOs: 370-377 and 389-424. Inteins suitable for use in embodiments of the present disclosure and methods for use thereof are described in U.S. Pat. No. 10,526,401, International Patent Application Publication No. WO 2013/045632 or WO 2020/051561, and in U.S. Patent Application Publication No. US 2020/0055900, the full disclosures of which are incorporated herein by reference in their entireties by reference for all purposes.

[0531] Intein-N and intein-C may be fused to the N-terminal portion of a split Cas9 and the C-terminal portion of the split Cas9, respectively, for the joining of the N-terminal portion of the split Cas9 and the C-terminal portion of the split Cas9. For example, in some embodiments, an intein-N is fused to the C-terminus of the N-terminal portion of the split Cas9, i.e., to form a structure of N—[N-terminal portion of the split Cas9]-[intein-N]—C. In some embodiments, an intein-C is fused to the N-terminus of the C-terminal portion of the split Cas9, i.e., to form a structure of N-[intein-C]—[C-terminal portion of the split Cas9]-C. In embodiments, a base editor is encoded by two polynucleotides, where one polynucleotide encodes a fragment of the base editor fused to an intein-N and another polynucleotide encodes a fragment of the base editor fused to an intein-C. Methods for designing and using inteins are known in the art and described, for example by WO2014004336, WO2017132580, WO2013045632A1, US20150344549, and US20180127780, each of which is incorporated herein by reference in their entirety.

[0532] In some embodiments, an ABE was split into N- and C-terminal fragments at Ala, Ser, Thr, or Cys residues within selected regions of SpCas9. These regions correspond to loop regions identified by Cas9 crystal structure analysis.

[0533] The N-terminus of each fragment is fused to an intein-N and the C-terminus of each fragment is fused to an intein C at amino acid positions S303, T310, T313, S355, A456, S460, A463, T466, S469, T472, T474, C574, S577, A589, and S590, referenced to SEQ ID NO: 197.

### PHARMACEUTICAL COMPOSITIONS

[0534] In some aspects, the present disclosure provides a pharmaceutical composition comprising any of the cells, polynucleotides, vectors, base editors, base editor systems, guide polynucleotides, fusion proteins, complexes, or the fusion protein-guide polynucleotide complexes described herein.

[0535] The pharmaceutical compositions of the present disclosure can be prepared in accordance with known techniques. See, e.g., Remington, The Science and Practice of Pharmacy (21st ed. 2005). In general, the cell, or population thereof is admixed with a suitable carrier prior to administration or storage, and in some embodiments, the pharmaceutical composition further comprises a pharmaceutically acceptable carrier. Suitable pharmaceutically acceptable carriers generally comprise inert substances that aid in administering the pharmaceutical composition to a subject, aid in processing the pharmaceutical compositions into deliverable preparations, or aid in storing the pharmaceutical composition prior to administration. Pharmaceutically acceptable carriers can include agents that can stabilize, optimize or otherwise alter the form, consistency, viscosity, pH, pharmacokinetics, solubility of the formulation. Such agents include buffering agents, wetting agents, emulsifying agents, diluents, encapsulating agents, and skin penetration enhancers. For example, carriers can include, but are not limited to, saline, buffered saline, dextrose, arginine, sucrose, water, glycerol, ethanol, sorbitol, dextran, sodium carboxymethyl cellulose, and combinations thereof.

[0536] In some embodiments, the pharmaceutical composition is formulated for delivery to a subject. Suitable routes of administrating the pharmaceutical composition described herein include, without limitation: topical, subcutaneous, transdermal, intradermal, intralesional, intraarticular, intraperitoneal, intravesical, transmucosal, gingival, intradental, intracochlear, transtympanic, intraorgan, epidural, intrathecal, intramuscular, intravenous, intravascular, intraosseus, periocular, intratumoral, intracerebral, and intracerebroventricular administration.

[0537] In some embodiments, the pharmaceutical composition described herein is administered locally to a diseased site. In some embodiments, the pharmaceutical composition described herein is administered to a subject by injection, by means of a catheter, by means of a suppository, or by means of an implant, the implant being of a porous, non-porous, or gelatinous material, including a membrane, such as a sialastic membrane, or a fiber.

[0538] In some embodiments, any of the fusion proteins, gRNAs, and/or complexes described herein are provided as part of a pharmaceutical composition. In some embodiments, the pharmaceutical composition comprises any of the fusion proteins or complexes provided herein. In some embodiments pharmaceutical composition comprises a gRNA, a nucleic acid programmable DNA binding protein, a cationic lipid, and a pharmaceutically acceptable excipient. In embodiments, pharmaceutical compositions comprise a lipid nanoparticle and a pharmaceutically acceptable excipient. In embodiments, the lipid nanoparticle contains a gRNA, a base editor, a complex, a base editor system, or a component thereof of the present disclosure, and/or one or more polynucleotides encoding the same. Pharmaceutical compositions can optionally comprise one or more additional therapeutically active substances.

[0539] The compositions, as described above, can be administered in effective amounts. The effective amount will depend upon the mode of administration, the particular condition being treated, and the desired outcome. It may also depend upon the stage of the condition, the age and physical condition of the subject, the nature of concurrent therapy, if any, and like factors well-known to the medical practitioner. For therapeutic applications, it is that amount sufficient to achieve a medically desirable result.

[0540] In some embodiments, compositions in accordance with the present disclosure can be used for treatment of any of a variety of diseases, disorders, and/or conditions.

### Methods of Treatment

[0541] Some aspects of the present disclosure provide methods of treating a subject in need, the method comprising administering to a subject in need an effective therapeutic amount of a pharmaceutical composition as described herein. More specifically, the methods of treatment include administering to a subject in need thereof one or more pharmaceutical compositions comprising one or more cells having at least one edited gene. In other embodiments, the methods of the disclosure comprise expressing or introducing into a cell a base editor polypeptide and one or more guide RNAs capable of targeting a nucleic acid molecule encoding at least one polypeptide.

[0542] In various embodiments, the methods of the disclosure involve co-administering to a subject in need of treatment for a neoplasia allogeneic immune effector cells modified according to the methods provided herein and an immunosuppressive agent. Administration of the immunosuppressive agent can have the advantage of reducing or eliminating rejection of the allogeneic immune effector cells by the subject's immune system (e.g., T cells or NK cells). In some embodiments, the method is a treatment for a neoplasia (e.g., a lymphoma or a leukemia, such as a B cell lymphoma). If the cells are used for treating a neoplasia, it can be advantageous for the allogeneic immune effector cells (e.g., NK cells or T cells) to express a chimeric antigen receptor (CAR) capable of binding a marker associated with the neoplasia (e.g., a CD19 polypeptide). In embodiments, the modified immune effector cells have reduced expression or activity of an FKBP1A, NR3C1, or PPIA polypeptide relative to unmodified allogeneic immune effector cells. The modified immune effector cells have increased resistance to immunosuppression by the immunosuppressive agent relative to unmodified immune effector cells. Non-limiting examples of immunosuppressive agents include mTOR inhibitors (e.g., a rapalog, such as rapamycin or everolimus), calcineurin inhibitors (e.g., cyclosporine A or tacrolimus), and glucocorticoids (e.g., dexamethasone or prednisolone). In embodiments, modified allogeneic immune effector cells (e.g., CAR-T or CAR-NK cells) show increased killing of neoplastic cells in the subject administered the immunosuppressive agent relative to unmodified allogeneic immune effector cells.

[0543] The immunosuppressive agent may be administered to the subject about 1, 2, 3, 4, 5, 6, 7, 8, 9, or 10 times every 1, 2, 3, 4, 5, 6, 7, 8, 9, 10, 11, 12, 13, 14 days or every month following an initial administration of cells of the disclosure. The immunosuppressive agent may be administered to a subject before, after, or at the same time as the modified immune cells of the disclosure. In some cases, the immunosuppressive agent is administered or first administered within 1 hr, 2 hr, 3 hr, 4 hr, 5 hr, 6 hr, 12 hr, 1 day, 2 days, 3 days, 4 days, 5 days, 6 days, 7 days, or 1 month, before or after an administration (e.g., first administration) of the modified immune cells of the disclosure to a subject.

[0544] One of ordinary skill in the art would recognize that multiple administrations of the pharmaceutical compositions contemplated in particular embodiments may be required to affect the desired therapy. For example, a composition may be administered to the subject 1, 2, 3, 4, 5, 6, 7, 8, 9, or 10 or more times over a span of 1 week, 2 weeks, 3 weeks, 1 month, 2 months, 3 months, 4 months, 5 months, 6 months, 1 year, 2 years, 5, years, 10 years, or more.

[0545] Administration of the pharmaceutical compositions contemplated herein may be carried out using conventional techniques including, but not limited to, infusion, transfusion, or parenterally. In some embodiments, parenteral administration includes infusing or injecting intravascularly, intravenously, intramuscularly, intraarterially, intrathecally, intratumorally, intradermally, intraperitoneally, transtracheally, subcutaneously, subcuticularly, intraarticularly, subcapsularly, subarachnoidly and intrasternally.

### Kits

[0546] The disclosure provides kits for the treatment of a neoplasia (e.g., a lymphoma) in a subject where the kit comprises a chimeric antigen receptor (CAR)-expressing immune effector cell comprising an edit to make it resistant to an immunosuppressive agent. In some embodiments, the kit further comprises an immunosuppressive reagent (mTOR inhibitors (e.g., a rapalog, such as rapamycin or Everolimus), Calcineurin Inhibitors (e.g., cyclosporine A or tacrolimus), and Glucocorticoids (e.g., Dexamethasone or Prednisolone). In some embodiments, the kit further includes a base editor system or a polynucleotide encoding a base editor system, wherein the base editor polypeptide system a nucleic acid programmable DNA binding protein (napDNAbp), a deaminase, and a guide RNA. In some embodiments, the napDNAbp is Cas9 or Cas12. In some embodiments, the polynucleotide encoding the base editor is a mRNA sequence. In some embodiments, the deaminase is a cytidine deaminase or an adenosine deaminase. In some embodiments, the kit comprises an edited cell and instructions regarding the use of such cell.

[0547] The kits may further comprise written instructions for using a base editor, base editor system and/or edited cell as described herein. In other embodiments, the instructions include at least one of the following: precautions; warnings; clinical studies; and/or references. The instructions may be printed directly on the container (when present), or as a label applied to the container, or as a separate sheet, pamphlet, card, or folder supplied in or with the container. In a further embodiment, a kit comprises instructions in the form of a label or separate insert (package insert) for suitable operational parameters. In yet another embodiment, the kit comprises one or more containers with appropriate positive and negative controls or control samples, to be used as standard(s) for detection, calibration, or normalization. The kit can further comprise a second container comprising a pharmaceutically-acceptable buffer, such as (sterile) phosphate-buffered saline, Ringer's solution, or dextrose solution. It can further include other materials desirable from a commercial and user standpoint, including other buffers, diluents, filters, needles, syringes, and package inserts with instructions for use.

[0548] The practice of embodiments of the present disclosure employs, unless otherwise indicated, conventional techniques of molecular biology (including recombinant techniques), microbiology, cell biology, biochemistry and immunology, which are well within the purview of the skilled artisan. Such techniques are explained fully in the literature, such as, “Molecular Cloning: A Laboratory Manual”, second edition (Sambrook, 1989); “Oligonucleotide Synthesis” (Gait, 1984); “Animal Cell Culture” (Freshney, 1987); “Methods in Enzymology” “Handbook of Experimental Immunology” (Weir, 1996); “Gene Transfer Vectors for Mammalian Cells” (Miller and Calos, 1987); “Current Protocols in Molecular Biology” (Ausubel, 1987); “PCR: The Polymerase Chain Reaction”, (Mullis, 1994); “Current Protocols in Immunology” (Coligan, 1991). These techniques are applicable to the production of the polynucleotides and polypeptides of the disclosure, and, as such, may be considered in making and practicing embodiments of the disclosure. Particularly useful techniques for particular embodiments will be discussed in the sections that follow.

[0549] The following examples are put forth so as to provide those of ordinary skill in the art with a complete disclosure and description of how to make and use the assay, screening, and therapeutic methods of the disclosure, and are not intended to limit the scope of what the inventors regard as their invention.

### EXAMPLES

### Example 1: Immunosuppressant Agents (e.g., Rapamycin, Tacrolimus) Inhibited T Cell and NK Cell-Mediated Alloresponse In Vitro

[0550] Experiments were undertaken to demonstrate that immunosuppressant agents (e.g., rapamycin and tacrolimus) inhibit T cell and NK cell mediated alloresponse in vitro.

[0551] First, human leukocyte antigen (HLA) mismatched peripheral blood mononuclear cells (PBMCs) from a donor were co-cultured in the presence and absence of an immunosuppressant agents with T cells from a different donor that were labeled using a CellTrace dye for measuring cell proliferation. The peripheral blood mononuclear cells (PBMC) cells were treated with mitomycin C prior to being co-cultured to prevent proliferation of the PBMC cells. It was observed (FIGS. 1A and 1B) that the immunosuppressant agents (rapamycin and tacrolimus) hindered proliferation of the T cells.

[0552] Next, NK cells were co-cultured with a population of cells containing both HLA class-I positive and HLA class-I negative cells in the presence and absence of immunosuppressant agents. Cytotoxicity of the NK cells (i.e., killing of the HLA class-I negative cells) was reduced by the immunosuppressant agents (FIG. 2).

### Example 2: Base Editing of T Cells to Reduce or Knock-Out Expression of NR3C1

[0553] Given that immunosuppressants can hinder the proliferation and/or cytotoxicity of T cells, experiments were undertaken to identify base editor systems suitable for editing T cells to reduce or eliminate expression of NR3C1 so that the cells would become resistant to suppression by immunosuppressive agents, such as glucocorticoids.

[0554] T cells were base edited to reduce or eliminate expression of NR3C1 by electroporating the cells with a guide polynucleotide selected from TSBT×1564, TSBT×1566, TSBT×1568, TSBT×1569, and TSBT×1575 (see Table 1 for guide sequences) and mRNA encoding the adenosine deaminase base editor ABE8.20m, or a guide polynucleotide selected from TSBT×1547, TSBT×1548, TSBT×1549, TSBT×1550, TSBT×1551, TSBT×1552, TSBT×1553, TSBT×1554, TSBT×1555, TSBT×1556, TSBT×1557, TSBT×1558, TSBT×1559, TSBT×1560, TSBT×1561, TSBT×1562, TSBT×1563, TSBT×1565, TSBT×1566, TSBT×1567, TSBT×1568, TSBT×1570, TSBT×1571, TSBT×1572, TSBT×1573, TSBT×1574, and TSBT×1576 (see Table 1 for guide sequences) and mRNA encoding the cytidine deaminase base editor rBE4. Base editing of the NR3C1 polypeptide in the T cells was measured using next generation sequencing (FIG. 5). A number of the base editor systems achieved maximum base editing rates in excess of 40% or even 80%.

### Example 3: Base Editing of T Cells to Reduce or Knock-Out Expression of PPIA

[0555] Given that immunosuppressants can hinder the proliferation and/or cytotoxicity of T cells, experiments were undertaken to identify base editor systems suitable for editing T cells to reduce or eliminate expression of PPIA so that the cells would become resistant to suppression by immunosuppressive agents, such as calcineurin inhibitors.

[0556] T cells were base edited to reduce or eliminate expression of PPIA by electroporating the cells with a guide polynucleotide selected from TSBT×6143, TSBT×6144, TSBT×6145, TSBT×6146, TSBT×6147, and TSBT×6148 (see Table 1 for guide sequences) and mRNA encoding the adenosine deaminase base editor ABE8.20m. Base editing of the NR3C1 polypeptide in the T cells was measured using next generation sequencing (FIG. 6). Two of the base editor systems achieved maximum base editing rates in excess of 40%, and one base editor system achieved maximum base editing rates in excess of 80%.

[0557] Knock-out of PPIA expression in T cells edited using a base editor system containing the guide TSBT×6143 or TSBT×6146 (see Table 1 for guide sequence) and the adenosine deaminase base editor ABE8.20m was confirmed using flow cytometry (FIG. 7).

### Example 4: Human Leukocyte Antigen Class I (HLA-I) Expression Dictated Susceptibility of Allogeneic Immune Cells to Rejection by T Cells or NK Cells

[0558] Allogeneic CAR-T cells expressing mismatched HLA haplotypes elicit responses by recipient T cells. Host T cell recognition was mitigated by ablating surface human leukocyte antigen class I (HLA-I) and class II (HLA-II) expression using base editing to knock-out (^{KO}) beta-2-microglobulin (b2M^{KO}) and class-II transcriptional activator (CIITA^{KO}), respectively (FIGS. 14A to 14C). HLA-deficient T cells were invisible to alloreactive T cells and resisted in vitro elimination in mixed leukocyte assays (FIGS. 14D and 14E).

[0559] Although the absence of surface HLA mitigated T cell-driven rejection, it was found that ablation of HLA-I, but not HLA-II, sensitized allogeneic T cells to in vitro NK cell-mediated lysis (FIGS. 14F and 14G) and elicited robust degranulation by NK cells (FIG. 14H). The data indicated that the NK cell compartment in human immune system (HIS) mice was underdeveloped and required treatment with recombinant human IL-15 to prime endogenous NK cells against b2M^{KO} T cells in vivo (FIGS. 20A to 20E). To avoid IL-15-induced T cell-driven GVHD in HIS mice, the impact of HLA-I deficiency was assessed instead in a humanized NK cell (huNK) only mouse model. To do so, primary human CD56⁺ NK cells were transplanted into NSG/IL-15 transgenic (tg) mice. After 2 weeks engraftment, allogeneic TCR^{KO} HLA-I⁺ and HLA-I⁻ (b2M^{KO}) T cells were co-infused into huNK mice and unreconstituted NSG/IL-15tg control mice (FIG. 14I). In contrast to HIS mice, huNK mice rapidly rejected b2M^{KO} T cells, while HLA-I⁺ T cells resisted elimination (FIG. 14J). Not intending to be bound by theory, together, these data support that the status of HLA-I expression on allogeneic cells largely dictated susceptibility to either T cell- or NK cell-mediated rejection.

### Example 5: Reconstitution of HLA-Like Molecules was Insufficient to Restrain NK Cell Activity Against HLA-I Deficient T Cells

[0560] Re-introduction of ligands for HLA-specific inhibitory receptors such as an invariant HLA single chain (^{SC}) molecule (i.e., single-chain dimers and trimers of the disclosure) is an attractive approach to restore tolerance against HLA-I deficient immune cells (FIG. 15A). However, broad implementation of this strategy may be challenged by the heterogeneous pattern of HLA-specific inhibitory receptors governing NK cell activity (FIG. 15B). Indeed, b2M^{KO} T cells expressing an HLA-Bw4^{SC}, HLA-C1^{SC}, HLA-C2^{SC}, or HLA-E^{SC} attenuated degranulation by NK cells that only express their respective HLA-specific inhibitory receptor (FIGS. 15C and 15D), but failed to reduce the net frequency of CD107a⁺ NK cells to levels observed by stimulation with unmodified allogeneic T cells (FIG. 15E). Furthermore, HLA^{SC} molecules did not substantially protect b2M^{KO} T cells from lysis by NK cells, unlike unmodified T cells which were not killed (FIG. 15F). Not intending to be bound by theory, these data suggest that the overall benefit of an HLA^{SC} was nullified due to the insufficient frequency of NK cell subsets expressing the corresponding HLA-specific inhibitory receptor, whereas broad inhibition required the full complement of HLA-I alleles.

### Example 6: Immunosuppression Treatment Mitigated T Cell-Mediated Allorejection of Human Leukocyte Antigen Class I Positive (HLA-I⁺) Chimeric Antigen Receptor-Expressing T Cells (CAR-T Cells)

[0561] Given that complete HLA-I expression broadly inhibited NK cell-driven rejection, an alternative strategy was investigated where allogeneic CAR-T cells retained HLA-I expression, while concomitant immunosuppressant treatment mitigated recipient T cell responses. It was first determined if immunosuppressants mitigate the in vitro priming of alloreactive T cells. To do so, peripheral blood mononuclear cells and CellTrace Violet-labeled T cells from HLA disparate donors were cultured in the presence of rapamycin (RPM), tacrolimus (TAC) or vehicle (VEH) control. As expected, the addition of immunosuppressants severely attenuated the proliferation of alloreactive T cells relative to vehicle (VEH) treatment (FIGS. 21A to 21C). Next, it was tested whether immunosuppressants alleviated in vivo T cell-driven rejection of allogeneic HLA-I CAR-T cells. Five cohorts of human immune system (HIS) mice derived from unrelated human donors were injected daily with RPM, TAC, or VEH for 2 weeks, and at 1-day post-treatment initiation all mice were co-infused with an equal amount of allogeneic HLA⁺ and HLA-deficient CAR-T cells (FIG. 16A). Cohorts #3 and #4 also received syngeneic human immune system (HIS) mouse-derived CAR-T cells to control for autologous T cell persistence. All T cell populations were engineered to express a non-targeting CD4-based CAR separated by a 2A self-cleaving peptide to a molecular tag that facilitated ex vivo identification by flow cytometry (FIGS. 22A to 22C) and allogeneic CAR-T cells were base-edited to disrupt TCR expression.

[0562] Both allogeneic CAR-T cell populations were equally detected in the peripheral blood of all groups at 1-day post-infusion, but thereafter, rapid depletion of circulating HLA⁺ CAR-T cells was observed in VEH-treated mice, whereas HLA-deficient CAR-T cells persisted for the study duration (FIGS. 16B and 16C). In contrast, RPM and TAC treatment significantly mitigated rejection of peripheral allogeneic HLA⁺ CAR-T cells at 1- and 2-weeks post-treatment initiation (FIGS. 16B and 16C). It was also observed that allogeneic HLA⁺ CAR-T cells from immunosuppressed mice persisted to the same degree as syngeneic CAR-T cells from within individual mice during the treatment window (FIG. 16D). Notably, the extent of circulating allogeneic HLA⁺ CAR-T cell preservation positively correlated with the contemporaneous plasma concentration of RPM and TAC (FIGS. 16E and 16F). Following treatment cessation, allogeneic HLA⁺ CAR-T cells were nearly undetectable in tissue indicating immunologic rejection (FIGS. 16G and 16H). Overall, at the chosen dosages TAC improved cumulative allogeneic HLA⁺ CAR-T cell persistence during the treatment window (FIG. 16I) and post-treatment withdrawal (FIG. 16J). These data demonstrated that RPM and TAC treatment extended the in vivo lifespan of allogeneic HLA⁺ CAR-T cells upon transfer into HLA-disparate lymphoreplete recipient mice.

[0563] An experiment was undertaken to further demonstrate that RPM and TAC treatment significantly mitigated allorejection of peripheral allogeneic HLA-ABC⁺ CAR-T cells by recipient humanized mice and that humanized mice treated with vehicle were capable of eliminating the HLA⁺ CAR-T, as evidenced by a reduction in HLA⁺ CAR-T levels in peripheral blood at 7 and 14 days post-infusion (FIG. 29). Humanized mice (huCD34-NCG; n=3) were treated with rapamycin (1 mg/kg) and tacrolimus (10 mg/kg) or received vehicle control (n=8) daily for 2 weeks via intraperitoneal injection. One day after drug-treatment initiation, mice were infused with a combination of 5 million HLA-positive allogeneic T cells expressing an anti-CD4 chimeric antigen receptor (i.e., HLA-ABC⁺ 4CAR-T cells) and base edited to knock-out (KO) T cell receptor (TCR) expression and 5 million HLA-negative 4CAR-T cells (i.e., HLA-ABC-4CAR-T cells) that were base-edited to KO TCR expression, beta-2-microglobulin (B2M) expression, and class-II transcriptional activator (CIITA) expression. The persistence of the 4CAR-T cells in peripheral blood in the mice was assessed by flow cytometry at 1, 7, and 14-days post-infusion using blood samples collected through puncture of the submandibular vein (FIG. 29).

[0564] The allogeneic 4CAR-T cells were generated via lentiviral transduction with a polynucleotide encoding an anti-CD4 chimeric antigen receptor (CAR) (i.e., 4CAR) containing an extracellular anti-CD4 antigen binding domain fused to a CD8a hinge domain, a CD8a transmembrane domain, a 4-1BB activating domain, and a CD3zeta activating domain. The 4CAR-T cells were base-edited by contacting the cells with a base editor system containing an mRNA molecule encoding the base editor ABE8.20m and one or more of the following guide RNAs: sgRNA TSBT×4073 (see Table 2B) to base edit the cells to knock out expression of CD3E and, thereby, knock out TCR expression; sgRNA TSBT×760 (see Table 2B) to base edit the cells to knock out expression of B2M and, thereby, knock out expression of HLA class-I polypeptides (e.g., HLA-A, HLA-B, and HLA-C); and sgRNA TSBT×763 (see Table 2B) to base edit the cells to knock out expression of CIITA and, thereby, knock out expression of HLA class-II polypeptides.

### Example 7: Genetic Disruption of FK506-Binding Protein 1A (FKBP1A) Rendered Chimeric-Antigen Receptor Expressing T Cells (CAR-T Cells) Resistant to Immunosuppression

[0565] To enable concomitant treatment with rapamycin (RPM) or tacrolimus (TAC), immunosuppressant resistant CAR-T cells were engineered by disrupting the gene encoding FK506-Binding Protein 1A (FKBP1A), which is an intracellular binding partner of RPM and TAC, and their interaction inhibits mTOR and calcineurin activation, respectively. FKBP1A-specific synthetic guide RNAs (sgRNA) were paired with mRNA encoding either an adenosine (ABE; ABE8.20m) or cytosine (CBE; rBE4) base editor and electroporated into activated primary human T cells (FIG. 3, and Tables 1A, 2A and 2B). This screen identified an ABE-sgRNA (TSBT×1538) complex targeting a conserved intron-exon splice junction that achieved a mean on-target genomic editing efficiency of 93.7% (FIG. 17A) and reduced protein expression (FIG. 4). Following activation, FKBP1A^{KO} T cells treated with RPM retained phosphorylation of the S6 ribosomal protein, a downstream substrate of the PI3K/Akt/mTOR pathway (FIGS. 17B and 17C), and maintained calcineurin induced NFAT-driven GFP expression after TAC treatment (FIGS. 17D and 17E) which, without intending to be bound by theory, indicates that FKBP 1A^{KO} abrogated proximal signaling events mediated by these immunosuppressants.

[0566] To evaluate whether FKBP1A^{KO} conferred T cells in vitro functional resistance to immunosuppressants, CD19-specific CAR-T cells (19CAR) were stimulated with JeKo-1 mantle cell tumors in the presence of RPM, TAC or dimethyl sulfoxide (DMSO) vehicle (VEH). Both FKBP1A^{KO} CD4⁺ and CD8⁺ 19CAR-T cells proliferated greater than unedited 19CAR-T cells, and notably, expanded to a similar extent as their VEH-treated counterparts (FIGS. 8, 9, and 17F). Furthermore, immunosuppressant treatment drastically reduced the magnitude and frequency of unedited 19CAR-T cells producing IFNg and TNFa, while FKBP 1A^{KO} 19CAR-T cells maintained high levels of cytokine production relative to VEH treatment (FIGS. 10, 11, 17G, and 17H). FKBP1A^{KO} 19CAR-T cells also overcame RPM and TAC inhibition to eradicate GFP⁺ JeKo-1 tumors with nearly the same kinetics as VEH-treated counterparts. In contrast, immunosuppressant treatment diminished the ability of unedited 19CAR-T cells to control tumor growth (FIGS. 12A, 12B, 171, 23A to 23D, 24A, and 24B). Additionally, it was evaluated whether FKBP1A^{KO} rendered 19CAR-T cells resistant to corticosteroids, an important treatment option for patients experiencing adverse events following CAR-T cell therapy. Both dexamethasone and prednisone suppressed antigen-driven proliferation and cytokine production of FKBP1A^{KO} 19CAR-T cells, indicating that FKBP1A^{KO} does not interfere with steroid-mediated suppression (FIG. 25). Collectively, these findings indicate that genetic ablation of FKBP1A renders CAR-T cells resistant to RPM and TAC induced immunosuppression. Further, these findings show that if the CAR-T cells cause side effects (e.g., cytokine release syndrome (CRS)) in a subject, steroids may be administered to the subject to reduce the side effects, and/or the side effects may be reduced by halting treatment of the subject with rapamycin/tacrolimus to facilitate clearance of the CAR-T cells via allorejection.

### Example 8: FK506-Binding Protein 1A Knock-Out (FKBP1A^{KO}) Anti-Cluster of Differentiation 19 Chimeric Antigen-Receptor-Expressing T Cells (19CAR-T Cells) Overcame Immunosuppression to Control Tumor Progression In Vivo

[0567] To evaluate whether FKBP1A^{KO} 19CAR-T cells resisted immunosuppressant treatment in vivo, luciferase expressing JeKo-1 tumors were transplanted into NSG mice and 1 week later daily injections of RPM, TAC or VEH were initiated for 2 weeks. One day post-treatment initiation, mice were infused with either FKBP1A^{KO} or unedited 19CAR-T cells, or untransduced (UTD) control T cells (FIG. 18A). Both 19CAR-T cell populations eradicated tumors in DMSO vehicle (VEH)-treated mice relative to mice that received untransduced (UTD) T cells (i.e., T cells not expressing any CAR). TAC treatment attenuated the ability of unedited 19CAR-T cells to control tumor outgrowth, and in stark contrast, FKBP1A^{KO} CAR-T cells potently suppressed tumor progression (FIGS. 13A, 13B, and 18B to 18D). Despite TAC treatment FKBP1A^{KO} CAR-T cells drastically reduced cumulative tumor burden during the treatment interval equivalent to their VEH-treated counterparts (FIGS. 18B to 18D), indicating that FKBP1A^{KO} conferred in vivo functional resistance to TAC.

[0568] Unlike TAC treatment, RPM administration mitigated JeKo-1 growth in control mice, which obscured the ability to perceive additive anti-tumor benefit in mice receiving FKBP1A^{KO} over unedited 19CAR-T cells (FIG. 18E). This observation is consistent with mature B cell malignancies exhibiting constitutive PI3K pathway activation and sensitivity to mTOR inhibitors. Indeed, RPM treatment attenuated protein phosphorylation of mTOR and downstream substrates S6Rp and 4E-BP1, as well as inhibited in vitro proliferation of JeKo-1, Raji and Nalm6 B cell cancer lines (FIGS. 26A to 26E). To overcome this obstacle, FKBP1A^{KO} JeKo-1 tumors were generated that exhibited comparable in vivo expansion kinetics to VEH treatment when in the presence of RPM (FIG. 18F). Now, FKBP1A^{KO} 19CAR-T cells in RPM-treated mice decreased cumulative tumor burden within the treatment interval to the same extent as in VEH-treated mice (FIG. 18G). These data demonstrate FKBP1A^{KO} 19CAR-T cells resisted immunosuppression and exhibit robust in vivo anti-tumor activity that mitigated disease progression.

### Example 9: Allogeneic FK506-Binding Protein 1A Knock-Out (FKBP1A^{KO}) Anti-Cluster of Differentiation 19 Chimeric Antigen-Receptor-Expressing T Cells (19CAR-T Cells) and Tacrolimus (TAC) Treatment Overcame Allorejection to Induce B Cell Aplasia In Vivo

[0569] It was assessed whether immunosuppressant treatment mitigated in vivo rejection of allogeneic HLA-I⁺ FKBP1A^{KO} 19CAR-T cells to an extent that permitted functional immune responses. Here, the endogenous B cell compartment of human immune system (HIS) mice was leveraged as an on-target population for 19CAR-T cells, where both the depth of B cell aplasia and the persistence of allogeneic cells measured treatment efficacy. Human immune system (HIS) mice from four human leukocyte antigen (HLA) disparate cohorts (#6-#9) were allocated into 4 groups that received UTD T cells and DMSO vehicle (VEH) treatment (Group 1), HLA⁺ FKBP1A^{KO} 19CAR-T cells and VEH treatment (Group 2), HLA⁺ FKBP1A^{KO} 19CAR-T cells and TAC treatment (Group 3), and HLA-deficient 19CAR-T cells and VEH treatment (Group 4) (FIG. 19A). TAC and FKBP1A^{KO} 19CAR-T cell treated mice (Group 3) exhibited lower CD19⁺ B cell counts in peripheral blood (FIGS. 19B and 19C), spleen (FIG. 19D) and bone marrow (FIG. 19E) compared to VEH-treated mice (Group 2), and to a near-equivalent level in mice treated with HLA-deficient 19CAR-T cells (Group 4). A significant reduction in CD19 surface density on residual B cells (FIG. 19F) and emergence of CD19^{dim}CD22⁺ B cells (FIG. 19G) from mice in Group 3 compared to the Group 2 control was also measured, indicating effective selection pressure by HLA-I⁺ 19CAR-T cells in the presence of TAC. Furthermore, TAC treatment protected HLA-I⁺ 19CAR-T cells in peripheral blood (FIG. 19I) and spleen (FIG. 19J) from recipient allorejection to an extent equivalent to HLA-deficient 19CAR-T cells. FIGS. 19I to 19H show that persistence of HLA-I⁺ 19CAR-T cells in mice treated with TAC was equivalent to persistence of HLA-I deficient 19CAR-T cells in mice treated with VEH. Together, these data demonstrate that TAC treatment conferred FKBP1A^{KO} CAR-T cells sufficient protection from immunologic rejection to deplete endogenous B cells.

[0570] The above results establish that the edited 19CAR-T cells could effectively eliminate tumor cells from a subject being administered an immunosuppressant agent. Administration of the immunosuppressant agent to the subject may have the advantage of suppressing the subject's immune system to prevent or reduce rejection of CAR-T cells by the subject's immune system.

### Example 10: Disruption of FKBP1A Expression in Immune Cells Using Cas12b

[0571] CRISPR-Cas12b nuclease and paired guide RNA (gRNA) may induce frameshift insertion/deletion (indel) mutations resulting in a premature stop codon that disrupts endogenous expression of FK506-Binding Protein 1a (FKBP1A) in allogeneic human immune cells (e.g. T cells). CRISPR-Cas12b may also be used to interrupt expression of a gene, such as FKBP1A, by inserting a polynucleotide (e.g., a polynucleotide encoding a chimeric antigen receptor or a transgene) into the gene locus. Accordingly, experiments are undertaken to demonstrate the disruption of FKBP1A expression in immune cells using a CRISPR-Cas12b nuclease.

[0572] Primary human T cells are first cultured at 10⁶ cells/mL in complete medium containing ImmunoCult™ XF T Cell Expansion Medium (Stem-Cell Technologies), 1% Penicillin-Streptomycin, 2 mM GlutaMax™, 25 mM HEPES Buffer (Life Technologies), and 5% CTS™ ImmuneCell SR (ThermoFisher). The complete medium also contains 5 ng/ml human IL-15 (Biolegend) and 10 ng/mL IL-7 (Biolegend). T cells are stimulated with ImmunoCult Human CD3/CD28/CD2 T Cell Activator (Stem-Cell Technologies) following the manufacturer's instructions and then incubated at 37° C., 5% CO², and 95% humidity. Two-days post-activation, T cells are counted, washed with sterile PBS (Gibco) and resuspended in P3 buffer (Lonza) at 10⁷ cells/mL. T cells are electroporated with 1 mg of FKBP1A-specific gRNA containing a Cas12b scaffold and a spacer listed in Table 2A, and 2 mg of mRNA encoding a Cas12b nuclease per 10⁶ cells using a Lonza 4D-Nucleofector® system (program DH-102). T cells are allowed to recover in complete medium at 10⁶ cells/mL, and the complete medium is exchanged every other day to adjust T cell concentration to 5×10⁵ cells mL-1 until day 10 when cells are cryopreserved in CS10 for later analysis.

### Example 11: Disruption of FKBP1A Expression in Immune Cells Using Prime Editing

[0573] A prime editor construct (see sequences provided in Table 12) and paired prime editing guide RNA (pegRNA), with or without a secondary nicking guide RNA (nRNA), can induce targeted, programmable changes to genomic DNA. These targeted changes may include frameshift insertions/deletions (indel mutations) resulting in a premature stop codon that disrupts endogenous expression of FK506-Binding Protein 1a (FKBP1A) in allogeneic human immune cells (e.g., T cells). Alternatively, or additionally, these targeted changes may include transversion and/or transition mutations that may disrupt expression of FKBP1A in allogeneic human immune cells (e.g. T cells) through various mechanisms, such as splice site disruption, start site disruption, active site disruption, promoter or enhancer disruption, protein structure disruption, or stop codon insertion. Additional mutations may be encoded into the prime editing guide RNA (pegRNA) to increase the frequency or product purity of a mutation introduced to a polynucleotide using prime editing. Methods for editing polynucleotide sequences using prime editing are well known in the art (see, e.g., Petrova I O, Smirnikhina S A. The Development, Optimization and Future of Prime Editing. Int J Mol Sci. 2023 Dec. 1; 24(23):17045. doi: 10.3390/ijms242317045, the disclosure of which is incorporated herein in its entirety by reference for all purposes).

[0574] Experiments are undertaken to disrupt expression of FKBP1A in T cells. Primary human T cells are first cultured at 10⁶ cells/mL in complete medium comprising ImmunoCult™ XF T Cell Expansion Medium (Stem-Cell Technologies), 1% Penicillin-Streptomycin, 2 mM GlutaMax™ and 25 mM HEPES Buffer (Life Technologies), and 5% CTS™ ImmuneCell SR (ThermoFisher). The complete medium also contains 5 ng/ml human IL-15 (Biolegend) and 10 ng/mL IL-7 (Biolegend). T cells are stimulated with ImmunoCult Human CD3/CD28/CD2 T Cell Activator (Stem-Cell Technologies) following the manufacturer's instructions and then incubated at 37° C., 5% CO², and 95% humidity. Two-days post-activation, T cells are counted, washed with sterile PBS (Gibco) and resuspended in P3 buffer (Lonza) at 10⁷ cells/mL. The T cells are electroporated with 1 mg of FKBP1A-specific prime editor guide RNA (pegRNA) (see sequences provided in Table 10), 0.5 mg of FKBP1A-specific nRNA (see sequences provided in Table 11), and 2 mg of mRNA encoding the prime editor construct (PE2 or PE3) per 10⁶ cells using the Lonza 4D-Nucleofector® system (program DH-102). T cells are allowed to recover in complete medium at 10⁶ cells/mL and medium is exchanged every other day to adjust T cell concentration to 5×10⁵ cells mL⁻¹ until day 10 when cells are cryopreserved in CS10 for later analysis.

[0575] The following materials and methods were employed in the above examples.

### Human Immune System (HIS) Mice

[0576] Female (aged 6-8 weeks) NOD.Cg-Prkdc^{scid}IL2rg^{tm1Wjl}/SzJ (NSG) mice (Jackson Laboratory) were maintained in a pathogen-free facility. Briefly, to generate BLT humanized mice, NSG mice were anesthetized and whole-body irradiated (2 Gy), and then implanted with 1 mm³ fragments of human fetal liver and thymus tissue beneath the murine kidney capsule. Following, 1×10⁵ autologous fetal liver-derived CD34⁺ hematopoietic stem cells (HSCs) were intravenously injected within 6 hours of transplantation. Beam Therapeutics commercially obtained female NOD-Prkdc^{em26Ca52} IL2rg^{em26CD22}/NjuCrl (NCG) CD34⁺ humanized (huNCG) mice from Charles River and female (aged 6-8 weeks) NSG-Tg(IL15)1Sz/SzJ (NSG-IL15tg) mice from Jackson Laboratory. Mice were maintained in a pathogen-free facility at CRADL. Briefly, huCD34-NCG mice were generated from female (aged 4-6 weeks) NCG mice that were myeloablated and then intravenously infused with human umbilical cord blood-derived CD34⁺ stem cells from a qualified source. Humanized NK (huNK) mice were generated by supplementing the water of NSG-IL-15tg with Baytril (Bayer) for 1 week followed by whole-body irradiation (2 Gy). 5×10⁶ primary human CD56⁺ NK cells were then intravenously injected 24 hours later and permitted to engraft. At both facilities, mice were housed in microisolator cages and fed autoclaved food and water. Animal rooms were maintained at 72±2° F., 30-70% relative humidity and were on a 12:12 h light/dark cycle. Human reconstitution was assessed from 12-17 weeks post-transplant in BLT and huNCG mice, and 2-3 weeks post-transplant in huNK mice. Mice were included in studies when ≥25% of cells in the lymphocyte gate were human CD45⁺ in BLT and huNCG mice, and when human CD56⁺ cells achieved 10 cells mL⁻¹ blood in huNK mice.

### HIS Mouse-Driven Allorejection Model

[0577] For the studies described in FIGS. 16A to 16J, BLT mice were used Cohort #2 (n=12) and Cohort #5 (n=13), and huNCG mice were used in Cohort #1 (n=10), Cohort #3 (n=12) and Cohort #4 (n=10). HIS mice from each cohort were allocated into groups via matched distribution based on degree of human T cell engraftment using StudyLog software (Studylog Systems) and received daily intraperitoneal injections of rapamycin (RPM; 1 mg kg-1), tacrolimus (TAC; 10 mg kg-1), or vehicle (VEH) control for 2 weeks. Each HIS mouse cohort represented an independent study where mice in Cohort #1 received VEH (n=5) or RPM (n=5); Cohort #2 received VEH (n=5) or RPM (7); Cohort #3 received VEH (n=4), RPM (n=4), or TAC (n=4); Cohort #4 received VEH (n=4), RPM (n=3), or TAC (n=3); and Cohort #5 received VEH (n=7) or TAC (n=6). One day post-drug treatment initiation, HIS mice were intravenously infused with a unique allogeneic human donor-derived T cell product comprising 5×10⁶ TCR^{KO} 4CAR-T cells and 5×10⁶ TCR^{KO}b2M^{KO}CIITA^{KO} 4CAR-T cells. Mice in Cohort #3 and Cohort #4 were also infused with 5×10⁶ syngeneic mouse-derived 4CAR-T cells. Persistence of 4CAR-T cells was monitored at 1-day post-T cell infusion and weekly thereafter via blood draws from the retro-orbital sinus or submandibular vein. HIS mice in Cohort #5 were necropsied 24 hours after final drug treatment and tissues were collected to analyze 4CAR-T cells.

[0578] For the studies described in FIGS. 19A to 19J, huCD34-NCG mice were used in Cohort #6 (n=16), Cohort #7 (n=12), Cohort #8 (n=24), and Cohort #9 (n=12) and were evenly distributed into 4 groups via matched distribution based on degree of human T cell engraftment using StudyLog. HIS mice in Group #1 received VEH and 5×10⁶ untransduced (UTD) T cells; Group #2 received VEH and 5×10⁶ TCR^{KO}b2M^{KO}CIITA^{KO} 19CAR-T cells; Group #3 received TAC and 5×10⁶ TCR^{KO}FKBP1A^{KO} 19CAR-T cells; and Group #4 received VEH and 5×10⁶ TCR^{KO}b2M^{KO}CIITA^{KO} 19CAR-T cells. HIS mice were treated daily with TAC (10 mg kg⁻¹) or VEH for 11 days via intraperitoneal injections and at 1-day post-drug treatment initiation mice were intravenously infused with T cells derived from an allogeneic human donor. Endogenous B cell aplasia and persistence of 19CAR-T cells was monitored at 7- and 11-days post-drug treatment via blood draw from the submandibular vein and tissue collection at necropsy.

### NK Cell Rejection Model

[0579] For the study described in FIGS. 20A to 20E, BLT mice received intraperitoneal injections every 2-3 days of 2.5 mg recombinant human IL-15 (BioLegend; n=6) or sterile PBS (n=3) for 6 total injections. Following, all mice were intravenously infused with an allogeneic human donor-derived T cell product comprising 5×10⁶ TCR^{KO} 4CAR-T cells and 5×10⁶ TCR^{KO}b2M^{KO}CIITA^{KO} 4CAR-T cells. Persistence of 4CAR-T cells was monitored at 1-, 4- and 7-days post-T cell infusion via blood draw from the retro-orbital sinus. For the study described in FIGS. 1H to 1J, huNK cell mice (n=5) and unreconstituted NSG-IL15tg control mice (n=5) were intravenously infused with an allogeneic human donor-derived T cell product comprising 5×10⁶ TCR^{KO} 4CAR-T cells and 5×10⁶ TCR^{KO}b2M^{KO}CIITA^{KO} 4CAR-T cells. Persistence of 4CAR-T cells was monitored at 1-day post-T cell infusion and weekly thereafter via blood draw from submandibular vein.

### Anti-Tumor Efficacy Model

[0580] For the study described in FIGS. 18A to 18G, NSG mice were intravenously injected with 5×10⁵ JeKo-1.Luc cells at day 0. On day 7, mice initiated daily intraperitoneal injections of VEH, RPM (1 mg kg⁻¹), or TAC (10 mg kg⁻¹) for 2 weeks. Mice from each treatment cohort were then injected on day 8 with 1×10⁶ UTD T cells, unmodified 19CAR-T cells, or FKBP1A^{KO} 19CAR-T cells (n=8 per group). For the study described in FIGS. 18F and 18G, NSG mice were intravenously injected with 5×10⁵ JeKo-1.FKBP1A^{KO}.Luc cells at day 0. On day 7, mice initiated daily intraperitoneal injections of VEH or RPM (1 mg kg⁻¹) for 2 weeks. Mice from each treatment cohort were then injected on day 8 with 1×10⁶ UTD T cells, unmodified 19CAR-T cells, or FKBP1A^{KO} 19CAR-T cells (n=10 per group). For all studies, tumor burden was measured every 3-4 days post-implant by bioluminescence imaging (IVIS Spectrum, Spectral Instruments Imaging) 30 minutes after intraperitoneally injecting mice with 150 mg kg⁻¹ XenoLight D-Luciferin (PerkinElmer). The acquisition time was automatically determined by the instrument for each exposure, and quantification of flux from imaging datasets was performed with the Living Image Studio software (Perkin Elmer). Briefly, a constant region-of-interest (ROI) was drawn over the mouse and flux was reported as total photon per second (ph/s).

### In Vivo Drug Formulation

[0581] Rapamycin (Thermo Fisher Scientific) and Tacrolimus (Cayman Chemical) were reconstituted in DMSO (Sigma-Aldrich; vehicle) at 10 mg mL⁻¹ and 25 mg mL⁻¹, respectively and 0.22 mm sterile-filtered. Rapamycin was diluted to 0.15 mg mL⁻¹ and Tacrolimus was diluted to 1.5 mg mL⁻¹ using sterile-filtered vehicle solution comprising a 1:1 ratio of 5% (v/v) Polyethylene Glycol (Sigma-Aldrich) and 5% (v/v) TWEEN-80 (Sigma Aldrich). PEG-TWEEN solution served as vehicle control and percent volume DMSO was normalized across all drug treatments.

### Mass Spectrometry

[0582] For the study described in FIGS. 3E and 3F, plasma concentrations of rapamycin and tacrolimus were determined using liquid chromatography-mass spectrometry (LC-MS). Mouse plasma from whole blood 1-week post-T cell infusion was isolated by centrifugation (2200×g, 5 minutes, 4° C.) and then cryopreserved. Thawed samples were injected into an Agilent Infinity 1290 II liquid chromatography coupled with a ScieX 6500+triple quad mass spectrometer. Briefly, the plasma, calibration curve (CC), and quality control (QC) samples were prepared by aliquoting 5 μL per sample into a 96-well plate. CC standards were prepared in mouse plasma (BioIVT, Part #) at 0.5, 1, 5, 25, 100, 500, 900, 1000 ng mL⁻¹. QC samples were prepared in mouse plasma at 1.5 ng mL⁻¹, 75 ng mL⁻¹, and 750 ng mL⁻¹. Tolbutamide was used as the internal standard and 100 μL of a 10 ng mL⁻¹ stock solution prepared in acetonitrile was added to each well except the wells containing 5 μL blank mouse plasma where 100 μL of acetonitrile was instead added. The plate was sealed and vortexed (1650 rpm, 3 minutes), and subsequently centrifuged (3500 rpm, 10 minutes) at room temperature. 50 μL of supernatant was transferred to a separate 96-well collection plate containing 50 μL water per well. The plate was vortexed (1600 rpm, 1 minute) and samples were injected into the LC-MS/MS system for analysis.

[0583] The separation column was a Zorbax SB-Phenyl, 1.7 μm, 40×2.1 mm column (Agilent). The mobile phase consisted of water containing 0.1% formic acid (Mobile Phase A) and methanol containing 0.1% formic acid (Mobile Phase B). The flow rate was 0.8 mL min-1 with an operating column temperature of 50° C. The gradient was from 25-80% B in 1 minute, then 80-98% B in 0.7 minute followed by a 1 minute hold, then 98-80% B in 0.7 minutes followed by a 0.5 minute hold, and finally brought back to 25% B in 0.5 minutes followed by 1.35 minutes of re-equilibration.

[0584] The MS Instrument was operated in multiple reaction monitoring (MRM) mode and positive electrospray ion mode with the following ion source conditions: curtain gas, 35 psi; gas 1, 70 psi; gas 2, 80 psi; ion spray voltage, 5500 V; and temperature, 500° C. The MRM transition and collision energy were m/z 936.6 >409.3 and 74 V for rapamycin, m/z 826.6 >616.4 and 48 V for tacrolimus, and m/z 271.0 >155.1 and 25 V for the internal standard Tolbutamide.

### Plasmid Construction

[0585] The transgene cassette comprising a CD4-based CAR (4CAR) construct containing the intracellular 4-1BB/CD3ζ intracellular domain and molecular tag comprising NGFRD, EGFRD, CD19D or GFP separated by an intervening T2A linker is described in Leibman, et al., PloS Pathog. 13:e1006613, (2017) PMID: 29023549, the disclosure of which is incorporated herein by reference in its entirety for all purposes. The CD19-specific CAR (19CAR) comprised the FMC63 single chain variable fragment (see Nicholson, et al., Mol Immunol., 34:1157-65 (1997), PMID: 9566763, the disclosure of which is incorporated herein by reference in its entirety for all purposes), CD8a hinge and transmembrane domains and 4-1BB/CD3ζ intracellular domain and was separated by an intervening T2A linker to truncated EGFR (see Wang, et al., Blood, 118:1255-63 (2011), PMID: 21653320, the disclosure of which is incorporated herein by reference in its entirety for all purposes). To generate the 6×NFAT reporter plasmid, six NFAT response elements (GGAGGAAAAACTGTTTCATACAGAAGGCGT (SEQ ID NO: 773)) were placed upstream of the murine IFN-b promoter driving expression of GFP. HLA single chain molecules were cloned into an expression cassette upstream of a T2A link and truncated EGFR selection tag. Single chain molecules are fusion proteins consisting of the b2M signal peptide, b2M, (G₄S)₃ (SEQ ID NO: 486) linker, and the HLA extracellular, transmembrane, and cytoplasmic domains. Identity of the HLA alleles include HLA-Bw4⁺: HLA-B*57:01; HLA-C1 group: HLA-C*01:02 and *07:02; HLA-C2 group: HLA-C*04:01, *05:01, *06:02 and *18:01; and HLA-E*01:03. HLA-E single chain comprised an HLA-G*01 leader peptide (VMAPRTLFL (SEQ ID NO: 774)) situated between the signal peptide and b2M chain. HLA allele amino acid sequences are from the IPD-IMGT/HLA database. All gene fragments were custom synthesized and cloned by GenScript into a third-generation self-inactivating (SIN) lentiviral vector.

### Lentivirus Production

[0586] Lentiviral particles were generated using packaging expression vectors from Aldevron: VSV glycoprotein (pALD-VSV-G), HIV Rev (pALD-Rev) and HIV Gag/Pol (pALD-GagPol). The packaging plasmids along with the appropriate SIN transfer vector were transfected into HEK293T cells using Lipofectamine 2000 (Life Technologies). At 24 hours post-transfection, the HEK293T cell supernatant was collected, filtered through a 0.45-mm syringe-driven filter, mixed with PEG-it Virus Precipitation Solution (System Biosciences) and stored at 4° C. overnight following the manufacturer's instructions. After incubation, the virus solution was concentrated by centrifugation for 30 minutes at 1,500×g, 4° C. The supernatant was aspirated and the virus pellet was resuspended in 600 μl of complete Immunocult-XF T Cell Expansion Medium and stored at −80° C.

### T Cell Generation, Base Editing and Lentiviral Transduction

[0587] Healthy donor adult human leukopaks were commercially obtained from HemaCare (Charles River). T cells were isolated using StraightFrom® Leukopak® CD4/CD8 MicroBead Kit (Milenyi Biotec) following the manufacturer's protocol and cryopreserved in CS10 (Stem-Cell Technologies). T cells were thawed and placed in culture at 10⁶ cells mL⁻¹ in complete medium comprising ImmunoCult XF T Cell Expansion Medium (Stem-Cell Technologies), 1% Penicillin-Streptomycin, 2 mM GlutaMax and 25 mM HEPES Buffer (Life Technologies), and 5% CTS ImmuneCell SR (ThermoFischer). Complete medium was complemented with 5 ng mL⁻¹ human IL-15 (Biolegend) and 10 ng mL⁻¹ IL-7 (Biolegend). T cells were stimulated with ImmunoCult Human CD3/CD28/CD2 T Cell Activator (Stem-Cell Technologies) following manufacturer's instructions and incubated at 37° C., 5% CO² and 95% humidity. Two-days post-activation, T cells were counted, washed with sterile PBS (Gibco) and resuspended in P3 buffer (Lonza) at 10⁷ cells mL⁻¹. T cells were electroporated with 1 mg synthetic guide RNA (sgRNA) from Agilent and 2 mg mRNA encoding ABE8.20m or rBE4 per 10⁶ cells using the Lonza 4D Nucleofector system (program DH-102). Base editing with greater than 1 sgRNA was achieved by adding 1 mg of the additional sgRNA(s) per 10⁶ cells to the electroporation reaction. T cells then recovered in complete medium at 10⁶ cells mL-1 and were transduced with 300 mL of concentrated lentiviral vector per 10⁶ cells. Medium was exchanged every other day to adjust T cell concentration to 5×10⁵ cells mL⁻¹ until day 10 when cells were cryopreserved in CS10. Sequences for the 20 nucleotide spacers specific for CD3E, TRAC, b2M, CIITA, and FKBP1A can be found in Tables 2A and 2B. T cell products for in vivo studies were generated using CD3E, b2M (TSBT×760), CIITA sgRNAs and ABE8.20m mRNA (FIGS. 14H to 14J and FIGS. 16A to 16J); FKBP1A sgRNA and ABE8.20m mRNA (FIG. 5); and CD3E, b2M, CIITA, FKBP1A sgRNAs and ABE8.20m mRNA (FIGS. 19A to 19J). All T cell products for in vitro assays were generating using b2M, CIITA, FKBP1A sgRNAs and ABE8.20m mRNA.

### Next-Generation Sequencing (NGS) or Genomic DNA Samples

[0588] Genomic DNA (gDNA) samples were prepared to determine base editing efficiency as described in Diorio, et al., Blood, 140:619-629 (2022), PMID: 35560156, the disclosure of which is herein incorporated by reference in its entirety for all purposes. Briefly, 0.5-1×10⁶ cells were lysed using QuickExtract DNA Extraction Solution (Lucigen) according to the manufacturer's protocol. Two microliters of gDNA were added to a 25 mL polymerase chain reaction (PCR) containing Q5 High-Fidelity DNA Polymerase (New England Biolabs) and 0.5 mM forward and reverse primers. Primer sequences for gDNA amplification are listed in Table 9. PCR amplicons were then amplified using unique Illumina barcoding primer pairs, and then the resulting product was purified using Solid Phase Reversible Immobilization beads (Beckman Coulter) and quantified using a NanoDrop 1000 Spectrophotometer (Thermo Fischer Scientific). Barcoded amplicons were sequenced on an Illumina MiSeq instrument according to manufacturer's instructions. PCR amplification conditions are described in Gaudelli, et al. Nature, 551:464-471 (2017), PMID: 29160308, the disclosure of which is incorporated herein by reference in its entirety for all purposes.

Base Editor mRNA Production

[0589] mRNA production for adenosine (ABE8.20m) and cytosine (rBE4) base editors was performed as described in Gaudelli, et al. Nat Biotechnol. 38:892-900 (2020) PMID: 32284586, the disclosure of which is incorporated herein by reference in its entirety for all purposes. Briefly, editors were cloned into a plasmid encoding a T7 promoter, 5′ UTR, Kozak sequence, open reading frame encoding the editor, and 3′ UTR. Plasmids were linearized using BbsI-HF (New England Biolabs) and purified using DNA Clean and Concentrate Columns (Zymo Research). Linearized plasmid served as template for in vitro transcription with HiScribe T7 High-Yield RNA Synthesis Kit (New England BioLabs) following the manufacturer's instructions except cotranscriptional capping was performed with CleanCap AG (TriLink Biotechnologies). mRNA was purified using lithium chloride precipitation.

### Tumor Cell Line Generation

[0590] JeKo-1 (CRL-3006™), Raji (CCL-86™) and Nalm6, clone G5 (CRL-3273™) were obtained from the ATCC. All three cell lines were transduced with a SIN lentiviral vector encoding both GFP and Click Beetle Green luciferase (Luc). Nalm6 cells were also transduced with a lentiviral encoding iRFP670. To generate JeKo-1.FKBP1A^{KO}.Luc cells, parental JeKo-1. Luc cells were electroporated with 1 mg TSBT×1538 sgRNA complexed and 2 mg ABE8.20m mRNA using the Lonza 4D Nucleofector system (SF buffer, program DJ-105). To generate Nalm6.CD19^{KO}.iRFP670 cells, parental Nalm6.iRFP670 cells were electroporated with 1 mg TSBT×3773 sgRNA complexed and 2 mg ABE8.20m mRNA using the Lonza 4D Nucleofector system (SF buffer, program CV-104). All tumor cells were sorted on GFP or iRFP670 positivity, or CD19-negative surface expression using the Aria Phusion (BD Bioscience) to obtain a clonal population. Single clones were analyzed by next-generation sequencing to confirm FKBP1A disruption.

### Mixed Leukocyte Reaction

[0591] Alloreactive T cells were generated in FIGS. 14D and 14E by culturing CD3⁺ T cells (effectors) with mismatched HLA-A*02⁺ CD3-depleted PBMCs (targets) from a separate donor in duplicate. CD3 selections were performed using CD3 MicroBeads (Milenyi Biotec) following manufacturer's protocol. Effector and target cells were mixed at a 1:1 ratio in complete medium supplemented with 300 U mL⁻¹ IL-2 (Sartorius) for 7-10 days. Activated HLA-A*02⁻ effector T cells were then cultured at different ratios with PBMC donor-matched HLA-A*02⁺ T cells that were unmodified HLA-A*02⁺ (on-target) or HLA-deficient b2M^{KO} CIITA^{KO} (off-target) and labelled with CellTrace Far Red (Thermo Fisher Scientific). On- and off-target T cells were combined at 1:1 ratio before adding effector T cells to measure the relative frequency of target T cells within the same well 48 hours post-culture using flow cytometry.

[0592] For the study described in FIGS. 21A to 21C, CellTrace Violet (Thermo Fisher Scientific) CD3⁺ T cells (effectors) and CD3-depleted PBMCs (targets) from HLA disparate donors were cultured in triplicate at a 1:1 ratio in complete medium supplemented with 300 U mL⁻¹ IL-2. Cells were cultured in the presence of RPM at 10⁻², 10⁻³ and 10⁻⁴ mg mL⁻¹, TAC at 10⁰, 10⁻¹, and 10⁻² mg mL⁻¹, and DMSO control. Effector T cells cultured in the absence of target cells served as an unstimulated control. Frequency of dividing effector CD8⁺ and CD4⁺ T cells was measured at day 5 and 7 post-stimulation by flow cytometry.

### NK Cell Cytotoxicity and Degranulation Assays

[0593] Human NK cells were isolated using StraightFrom® Leukopak® REAlease CD56 MicroBead Kit (Milenyi Biotec) or CD56 MicroBeads (Miltenyi Biotec). NK cells were primed for 3 days in complete medium with 5 ng mL⁻¹ IL-15 and 300 U mL⁻¹ IL-2. Primed NK cells were cultured at different ratios with allogeneic T cells that were unmodified HLA⁺ (off-target) or HLA-deficient b2M^{KO} CIITA^{KO} (on-target). On- and off-target T cells were combined at 1:1 ratio before adding primed NK cells to measure the relative change in frequency of target T cells compared to control wells in the absence of NK cells. Specific lysis of on-target T cells was measured 48 hours post-culture by flow cytometry using the formula: Specific Lysis (%)=100−(100×(% survival in the presence of NK cells/% survival in the absence of NK cells)). NK cell degranulation was measured by culturing primed NK cells with on-target or off-target allogeneic T cells, or alone. Anti-CD107a antibody was added at the start of stimulation followed by the addition of 1× Monensin Solution and 1× Brefeldin A (BioLegend) 1 hour later. Cells were incubated for 6 hours total before analysis by flow cytometry.

### CAR-T Cell Cytotoxicity Assays

[0594] Cryopreserved untransduced (UTD) T cells, unmodified 19CAR-T cells, and FKBP1A^{KO} 19CAR-T cells were thawed and rested overnight at 37° C., 5% CO₂. On the day of assay set-up, a 96-well flat bottom plate (Corning) was coated with 0.01% Poly-L-Ornithine solution (Sigma Aldrich) for 30 minutes, and then decanted and left to dry for 30 minutes. Afterwards, 2.5×10⁴ JeKo-1.FKBP1A^{KO}.GFP⁺ tumor cells were seeded into the 96-well plate and cultured in triplicate with T cells at 0:1, 1:1, 0.25:1 and 0.125:1 effector-to-target cell (E/T) ratios. Rapamycin (100 nM), tacrolimus (100 ng mL-1) and vehicle (DMSO) control were added at the start of culture and then again at 48, 96 and 144 hours post-culture. Samples were transferred to Incucyte SX5 Live-Cell Analysis System (Sartorius) and imaged every 4 hours to assess GFP fluorescence intensity.

[0595] To perform the VITAL cytotoxicity assay, 2.5×10⁴ Nalm6.CD19^{WT}.GFP⁺ cells and 2.5×10⁴ Nalm6.CD19^{KO}.iRFP670⁺ cells were seeded per well of a 96-well flat bottom plate. UTD T cells, unmodified 19CAR-T cells, and FKBP1A^{KO} 19CAR-T cells were added at 0:125:1, 0.06:1, 0.03:1, 0.015:1, and 0:1 E/T ratios. Samples were incubated at 37° C., 5% CO₂ for 48 hours before flow cytometric analysis to measure the frequency of viable GFP⁺ and iRFP670⁺ Nalm6 tumor cells. Specific lysis of Nalm6.GFP⁺ cells was measured using the formula: Specific Lysis (%)=100−(100×(% survival in the presence of T cells/% survival in the absence of T cells)).

### CAR-T Cell Cytokine Production Assay

[0596] Cryopreserved unmodified and FKBP1A^{KO} 19CAR-T cells were thawed into complete medium and rested overnight at 10⁶ cells mL⁻¹ in the incubator at 37° C., 5% CO₂. T cells were pre-treated overnight with rapamycin (100 nM), tacrolimus (100 ng mL⁻¹), or vehicle (DMSO) control prior to assay set-up. The following day, T cells were washed, counted and 1×10⁵ cells were seeded in duplicate into a 96-well flat bottom plate alone or with 2×10⁵ JeKo-1.GFP⁺ tumor cells. Anti-CD107a antibody was added at the start of stimulation followed by the addition of 1× Monensin Solution and 1X Brefeldin A (BioLegend) 1 hour later. Cells were incubated for 6 hours total before analysis by flow cytometry.

### CAR-T Cell Proliferation Assay

[0597] Cryopreserved unmodified and FKBP1A^{KO} 19CAR-T cells were thawed into complete medium and rested overnight at 10⁶ cells mL⁻¹ in the incubator at 37° C., 5% CO₂. The following day, T cells were washed, counted and 1×10⁴ cells were seeded in triplicate into a 96-well flat bottom plate alone or with 1×10⁴ JeKo-1.GFP⁺ tumor cells. Complete medium was supplemented with rapamycin (100 nM), tacrolimus (100 ng mL⁻¹), or vehicle (DMSO) control and refreshed on day 2, 4 and 6 post-culture. On day 7, samples were analyzed by flow cytometry and 19CAR-T cells were enumerated using CountBright Counting Beads (Thermo Fisher Scientific) following the manufacturer's protocol.

### Flow Cytometry

[0598] Cultured cells were washed and stained in 50 mL of 1×PBS containing 2 mM EDTA and 2% fetal calf serum, and whole blood was stained directly with anti-human antibodies from BioLegend: CD45 (HI30), CD3 (OKT3), CD2 (RPA-2.10), CD4 (OKT4), CD8 (SK1), CD56 (5.1H11), CD107a (H4A3), CD19 (HIB19), CD22 (HIB22), HLA-A2 (BB7.2), HLA-DR (L243), NGFR (ME20.4), EGFR (AY13), NKG2A (S19004C), LIR-1 (GHI/75), HLA-ABC (W6/32), KIR2DL1 (HP-DM1), KIR2DL2/L3 (DX27), KIR3DL1 (DX9), KIR2DL4 (mAB33), KIR2DL5 (UP—R1). Live cells were discriminated by staining negative for Fixable Viability Dye eFluor780 (eBioscience). CountBright Counting Beads were used according to the manufacturer's instructions to determine concentration of immune cells from whole blood. Intracellular cytokines were detected using Cell Fixation & Cell Permeability Kit (Invitrogen) following manufacturer's protocol with anti-human antibodies from Biolegend: TNF-a (MAb11), IFN-g (4S.B3), IL-2 (MQH-17H12) and GM-CSF (BVD2-21C11). Phosphorylated intracellular proteins using BD Cytofix Fixation Buffer and BD Phosflow Perm Buffer III (BD Biosciences) according to the manufacturer's instructions with anti-human antibodies from BD Biosciences: mTOR-pS2448 (021-404), S6-pS235/pS236 (N7-548), 4EBP1-pT36/pT45 (M31-16). Flow cytometry data was acquired on the MACSQuant Analyzer 16 (Miltenyi Biotec) and FACSymphony A3 Cell Analyzer (BD Biosciences). Data was analyzed using FlowJo software v.10 (Tree Star).

### Phosphorylated

[0599] Prior to staining T cells, the culture medium was supplemented with DMSO or rapamycin (10 mM) for 2 hours and then of Immunocult T Cell Activator (1:40 dilution) for an additional hour.

### Statistical Analysis

[0600] Comparison of matched samples were performed using two-sided non-parametric Wilcoxon matched-pairs signed rank test. Comparison of unmatched samples were performed using two-sided non-parametric Wilcoxon rank sum test or Kruskal-Wallace test followed by Dunn's test for multiple comparisons. Bivariate correlations were performed using two-sided Spearman's rank correlation. Area under the curve calculations were performed using either cell concentration per 1 mL blood or frequency of cells. All statistical analyses were performed using GraphPad Prism version 9.3.0 (GraphPad).

Design of pegRNA and nRNA Molecules

[0601] The pegRNA molecules of Example 11 were designed to have reverse transcriptase template (RTT) lengths of between 10 and 30 nucleotides and primer binding sequences (PBS) lengths of between 10 and 15 nucleotides. Software, such as pegFinder is commercially available to assist in the design of pegRNA molecules. Two spacer sequences were identified that had a nick-to-edit distance less than 15, and the pegRNA molecules were designed to contain one of these spacer sequences. The spacer sequences were GAAACCAUCUCCCCAGGAGA (Spacer 1; SEQ ID NO: 803) and CAGGUGGAAACCAUCUCCCC (Spacer 2; SEQ ID NO: 804). In some embodiments, Spacer 2 further comprises a 5′ G. The 228 pegRNA sequences of Table 10 (see, also FIGS. 27A, 27B, and 28) were designed to each containing Spacer 1 or Spacer 2 and different RTT/PBS lengths. In some cases, synonymous edits were introduced into the RTT to evade cellular mixed-match (MM) repair (MMR). The RTTs spanned 3 codons and 17 bases of intronic sequence of the FKPB1 gene (FIG. 28). The target sequence for editing was CTCaCCGTCTCCTGGGGAGA TGG (TSBT×1530; human chr20 positive strand positions 1392956-1392979; SEQ ID NO: 805), where a protospacer-adjacent motif is shown in bold, and where position 4, which is shown as a lowercase “a,” was the target nucleobase for editing. The pegRNA molecules contained the following scaffold sequence having the prefix (5′ terminal sequence) gtttt and having the suffix (3′ terminal sequence) gtgc: guuuuagaGCUAGAAAUAGCAAGUUAAAAUAAGGCUAGUCCGUUAUCAACUUGAAAAAGUGGCA CCGAGUCGgugc (SEQ ID NO: 806). In some embodiments, the pegRNA molecule contains a scaffold containing one of the following sequences:

(SEQ ID NO: 807)
GUUUUAGAGCUAGAAAUAGCAAGUUAAAAUAAGGCUAGUCCGUUAUCAA
CUUGAAAAAGUGGGACCGAGUCGGUCC,
(SEQ ID NO: 108)
agaGCUAGAAAUAGCAAGUUAAAAUAAGGCUAGUCCGUUAUCAACUUGA
AAAAGUGGCACCGAGUCG.

[0602] Since silent mutations at various positions in the RTT of pegRNA molecules are known to increase edit rates (X Li, et al., Nature Communications 2022), a number of the pegRNA sequences of Table 10 contain such silent mutations. For introducing silent mutations, any mismatch at any interval may be introduced within non-coding regions of a gene; however, mutations within a coding region (see FIG. 28) must correspond to synonymous mutations, as listed, e.g., in Table 8 below:

TABLE 8
Synonymous codon sequences.

| Codon | 13 | 12 | 11 | 10 | 9 | 8 |
|---|---|---|---|---|---|---|
| 1 | ACC | GTC | TCC | TGG | GGA | GAT |
| 2 | tCC | aTC | gCC | gGG | tGA | tAT |
| 3 | gCC | | cCC | cGG | cGA | aAT |
| 4 | cCC | | aCC | aGG | aGA | |

| Codon | 7 | 6 | 5 | 4 | 3 | 2 | 1 |
|---|---|---|---|---|---|---|---|
| 1 | GGT | TTC | CAC | CTG | CAC | TCC | CAT |
| 2 | tGT | cTC | tAC | tTG | tAC | gCC | |
| 3 | cGT | | gAC | | gAC | cCC | |
| 4 | aGT | | aAC | | aAC | aCC | |

[0603] The pegRNAs can also be used to introduce PAM immunizing edits. For example, a PAM immunizing edit for Spacer 1 may be introduced by mutating Codon 12 of the FKBP1 gene from GTC to aTC and, a PAM immunizing edit for Spacer 2 may be introduced by mutating Codon 10 of the FKBP1 gene from TGG to gGG, cGG, or aGG. By “immunizing edit” is meant an edit that, once introduced, alters the PAM corresponding to the spacer so as to prevent the prime editor construct complexed with a pegRNA containing a spacer corresponding to the PAM from binding to the sequence corresponding to the spacer.

[0604] The nRNA sequences of Table 11 were selected such that they could mediate a nick within 80 nt of the nick induced using Spacer 1 or Spacer 2.

[0605] In various embodiments, a pegRNA of Table 10 or an nRNA of Table 11 may include one or more modified nucleobases (e.g., a 2′-O-methyl (‘M’) and/or 3′-phosphorothioate modifications). In some embodiments, the three 5′ and/or 3′ terminal nucleobases of a pegRNA or an nRNA are modified nucleobases (e.g., having 2′-O-methyl (‘M’) and/or 3′-phosphorothioate modifications).

### Sequences

[0606] Table 9 below provides sequences for primers used in the above examples for sequencing of nucleobase edited sites. Tables 10 and 11 below provide sequences for prime editing guide RNAs (pegRNAs) and nicking RNAs (nRNAs) used in the above examples. Table 12 provides amino acid and nucleotide sequences for prime editor constructs used in the above examples.

TABLE 9
Primers used to sequence target sites altered using base editor systems containing
guide RNA's corresponding to the indicated sgRNA IDs.

| | PCR amplification primer | SEQ | PCR amplification primer | SEQ |
|---|---|---|---|---|
| sgRNA ID | (forward) | ID NO | (reverse) | ID NO |
| TSBTx760 | TGTCTTTCAGCAAGGACTGG | 752 | GACTCATTCAGGGTAGTATGG | 762 |
| | TCTTTCTA | | CCATAGA | |
| TSBTx845 | CGCGCTGGCGGGCATTCCTG | 753 | GCGGGCCACCAAGGAGAACTT | 754 |
| | AAGCTGA | | GGAGAA | |
| TSBTx763 | GCGGGCCACCAAGGAGAACT | 754 | GCGGGCCACCAAGGAGAACTT | 754 |
| | TGGAGAA | | GGAGAA | |
| TSBTx4073 | GGATCACCTGTCACTGAAGG | 755 | CGCAAAGACGCCTGGGCACTG | 763 |
| | AATTTTCA | | TGA | |
| TSBTx754 | GAGCTGCAGGCCTCCCCCAC | 756 | GCAGATTAAACCCGGCCACTT | 764 |
| | CCA | | TCAGG | |
| TSBTx1538 | CCGAGGTACTAGGCAGAGC | 757 | CCCTGAGGAGACAGAGACGG | 765 |
| TSBTx1542 | CCCAGGAGACGGTGAGTAGT | 758 | CCTCGACGGCCAGCC | 766 |
| TSBTx1545 | TATGCCTATGGTGCCACTGG | 759 | CTCTGCTACCCATCAAACGC | 767 |
| TSBTx1546 | GTCGCCACTGCACACAAAG | 760 | TCGGAAGCAAAGCTGAG | 768 |
| TSBTx1581 | TGATGAGTGCTCTGCTGCTG | 761 | GAGAGAGCATACCTGGGCAA | 769 |
| TSBTx1582 | CCGAGGTACTAGGCAGAGC | 757 | CCCTGAGGAGACAGAGACGG | 765 |
| TSBTx1537 | CCGAGGTACTAGGCAGAGC | 757 | CCCTGAGGAGACAGAGACGG | 765 |
| TSBTx1539 | CCCAGGAGACGGTGAGTAGT | 758 | CCTCGACGGCCAGCC | 766 |
| TSBTx1540 | CCCAGGAGACGGTGAGTAGT | 758 | CCTCGACGGCCAGCC | 766 |
| TSBTx1541 | CCCAGGAGACGGTGAGTAGT | 758 | CCTCGACGGCCAGCC | 766 |
| TSBTx1543 | GGCCAAGGAACACCTAGGTA | 770 | GAAGCTCCACATCGAAGACG | 772 |
| TSBTx1544 | TATGCCTATGGTGCCACTGG | 759 | CTCTGCTACCCATCAAACGC | 767 |
| TSBTx1577 | CACAGGGATGCTTGAAGATG | 771 | CACAGGGATGCTTGAAGATGG | 771 |
| | G | | | |
| TSBTx1578 | CACAGGGATGCTTGAAGATG | 771 | CACAGGGATGCTTGAAGATGG | 771 |
| | G | | | |
| TSBTx1579 | CACAGGGATGCTTGAAGATG | 771 | CACAGGGATGCTTGAAGATGG | 771 |
| | G | | | |
| TSBTx1580 | CACAGGGATGCTTGAAGATG | 771 | CACAGGGATGCTTGAAGATGG | 771 |
| | G | | | |

TABLE 10
pegRNA Sequences. In some embodiments, the pegRNA sequences further
comprise the nucleotide sequence “cacc” or “caccg” at the 5′-end.

| | SEQ |
|---|---|
| pegRNA Sequence | ID NO |
| GAAACCAUCUCCCCAGGAGAguuuuagaGCUAGAAAUAGCAAGUUAAAAUAAGGCUAGUCCG | 809 |
| UUAUCAACUUGAAAAAGUGGCACCGAGUCGgugcCUCgCCGUCUCCUGGGGAGA | |
| GAAACCAUCUCCCCAGGAGAguuuuagaGCUAGAAAUAGCAAGUUAAAAUAAGGCUAGUCCG | 810 |
| UUAUCAACUUGAAAAAGUGGCACCGAGUCGgugcCUCgCCGUCUCCUGGGGAGAU | |
| GAAACCAUCUCCCCAGGAGAguuuuagaGCUAGAAAUAGCAAGUUAAAAUAAGGCUAGUCCG | 811 |
| UUAUCAACUUGAAAAAGUGGCACCGAGUCGgugcCUCgCCGUCUCCUGGGGAGAUG | |
| GAAACCAUCUCCCCAGGAGAguuuuagaGCUAGAAAUAGCAAGUUAAAAUAAGGCUAGUCCG | 812 |
| UUAUCAACUUGAAAAAGUGGCACCGAGUCGgugcCUCgCCGUCUCCUGGGGAGAUGG | |
| GAAACCAUCUCCCCAGGAGAguuuuagaGCUAGAAAUAGCAAGUUAAAAUAAGGCUAGUCCG | 813 |
| UUAUCAACUUGAAAAAGUGGCACCGAGUCGgugcCUCgCCGUCUCCUGGGGAGAUGGU | |
| GAAACCAUCUCCCCAGGAGAguuuuagaGCUAGAAAUAGCAAGUUAAAAUAAGGCUAGUCCG | 814 |
| UUAUCAACUUGAAAAAGUGGCACCGAGUCGgugcCUCgCCGUCUCCUGGGGAGAUGGUU | |
| GAAACCAUCUCCCCAGGAGAguuuuagaGCUAGAAAUAGCAAGUUAAAAUAAGGCUAGUCCG | 815 |
| UUAUCAACUUGAAAAAGUGGCACCGAGUCGgugcACUCgCCGUCUCCUGGGGAGA | |
| GAAACCAUCUCCCCAGGAGAguuuuagaGCUAGAAAUAGCAAGUUAAAAUAAGGCUAGUCCG | 816 |
| UUAUCAACUUGAAAAAGUGGCACCGAGUCGgugcACUCgCCGUCUCCUGGGGAGAU | |
| GAAACCAUCUCCCCAGGAGAguuuuagaGCUAGAAAUAGCAAGUUAAAAUAAGGCUAGUCCG | 817 |
| UUAUCAACUUGAAAAAGUGGCACCGAGUCGgugcACUCgCCGUCUCCUGGGGAGAUG | |
| GAAACCAUCUCCCCAGGAGAguuuuagaGCUAGAAAUAGCAAGUUAAAAUAAGGCUAGUCCG | 818 |
| UUAUCAACUUGAAAAAGUGGCACCGAGUCGgugcACUCgCCGUCUCCUGGGGAGAUGG | |
| GAAACCAUCUCCCCAGGAGAguuuuagaGCUAGAAAUAGCAAGUUAAAAUAAGGCUAGUCCG | 819 |
| UUAUCAACUUGAAAAAGUGGCACCGAGUCGgugcACUCgCCGUCUCCUGGGGAGAUGGU | |
| GAAACCAUCUCCCCAGGAGAguuuuagaGCUAGAAAUAGCAAGUUAAAAUAAGGCUAGUCCG | 820 |
| UUAUCAACUUGAAAAAGUGGCACCGAGUCGgugcACUCgCCGUCUCCUGGGGAGAUGGUU | |
| GAAACCAUCUCCCCAGGAGAguuuuagaGCUAGAAAUAGCAAGUUAAAAUAAGGCUAGUCCG | 821 |
| UUAUCAACUUGAAAAAGUGGCACCGAGUCGgugcUACUCgCCGUCUCCUGGGGAGA | |
| GAAACCAUCUCCCCAGGAGAguuuuagaGCUAGAAAUAGCAAGUUAAAAUAAGGCUAGUCCG | 822 |
| UUAUCAACUUGAAAAAGUGGCACCGAGUCGgugcUACUCgCCGUCUCCUGGGGAGAU | |
| GAAACCAUCUCCCCAGGAGAguuuuagaGCUAGAAAUAGCAAGUUAAAAUAAGGCUAGUCCG | 823 |
| UUAUCAACUUGAAAAAGUGGCACCGAGUCGgugcUACUCgCCGUCUCCUGGGGAGAUG | |
| GAAACCAUCUCCCCAGGAGAguuuuagaGCUAGAAAUAGCAAGUUAAAAUAAGGCUAGUCCG | 824 |
| UUAUCAACUUGAAAAAGUGGCACCGAGUCGgugcUACUCgCCGUCUCCUGGGGAGAUGG | |
| GAAACCAUCUCCCCAGGAGAguuuuagaGCUAGAAAUAGCAAGUUAAAAUAAGGCUAGUCCG | 825 |
| UUAUCAACUUGAAAAAGUGGCACCGAGUCGgugcUACUCgCCGUCUCCUGGGGAGAUGGU | |
| GAAACCAUCUCCCCAGGAGAguuuuagaGCUAGAAAUAGCAAGUUAAAAUAAGGCUAGUCCG | 826 |
| UUAUCAACUUGAAAAAGUGGCACCGAGUCGgugcUACUCgCCGUCUCCUGGGGAGAUGGUU | |
| GAAACCAUCUCCCCAGGAGAguuuuagaGCUAGAAAUAGCAAGUUAAAAUAAGGCUAGUCCG | 827 |
| UUAUCAACUUGAAAAAGUGGCACCGAGUCGgugcCUACUCgCCGUCUCCUGGGGAGA | |
| GAAACCAUCUCCCCAGGAGAguuuuagaGCUAGAAAUAGCAAGUUAAAAUAAGGCUAGUCCG | 828 |
| UUAUCAACUUGAAAAAGUGGCACCGAGUCGgugcCUACUCgCCGUCUCCUGGGGAGAU | |
| GAAACCAUCUCCCCAGGAGAguuuuagaGCUAGAAAUAGCAAGUUAAAAUAAGGCUAGUCCG | 829 |
| UUAUCAACUUGAAAAAGUGGCACCGAGUCGgugcCUACUCgCCGUCUCCUGGGGAGAUG | |
| GAAACCAUCUCCCCAGGAGAguuuuagaGCUAGAAAUAGCAAGUUAAAAUAAGGCUAGUCCG | 830 |
| UUAUCAACUUGAAAAAGUGGCACCGAGUCGgugcCUACUCgCCGUCUCCUGGGGAGAUGG | |
| GAAACCAUCUCCCCAGGAGAguuuuagaGCUAGAAAUAGCAAGUUAAAAUAAGGCUAGUCCG | 831 |
| UUAUCAACUUGAAAAAGUGGCACCGAGUCGgugcCUACUCgCCGUCUCCUGGGGAGAUGGU | |
| GAAACCAUCUCCCCAGGAGAguuuuagaGCUAGAAAUAGCAAGUUAAAAUAAGGCUAGUCCG | 832 |
| UUAUCAACUUGAAAAAGUGGCACCGAGUCGgugcCUACUCgCCGUCUCCUGGGGAGAUGGUU | |
| GAAACCAUCUCCCCAGGAGAguuuuagaGCUAGAAAUAGCAAGUUAAAAUAAGGCUAGUCCG | 833 |
| UUAUCAACUUGAAAAAGUGGCACCGAGUCGgugcACUACUCgCCGUCUCCUGGGGAGA | |
| GAAACCAUCUCCCCAGGAGAguuuuagaGCUAGAAAUAGCAAGUUAAAAUAAGGCUAGUCCG | 834 |
| UUAUCAACUUGAAAAAGUGGCACCGAGUCGgugcACUACUCgCCGUCUCCUGGGGAGAU | |
| GAAACCAUCUCCCCAGGAGAguuuuagaGCUAGAAAUAGCAAGUUAAAAUAAGGCUAGUCCG | 835 |
| UUAUCAACUUGAAAAAGUGGCACCGAGUCGgugcACUACUCgCCGUCUCCUGGGGAGAUG | |
| GAAACCAUCUCCCCAGGAGAguuuuagaGCUAGAAAUAGCAAGUUAAAAUAAGGCUAGUCCG | 836 |
| UUAUCAACUUGAAAAAGUGGCACCGAGUCGgugcACUACUCgCCGUCUCCUGGGGAGAUGG | |
| GAAACCAUCUCCCCAGGAGAguuuuagaGCUAGAAAUAGCAAGUUAAAAUAAGGCUAGUCCG | 837 |
| UUAUCAACUUGAAAAAGUGGCACCGAGUCGgugcACUACUCgCCGUCUCCUGGGGAGAUGGU | |
| GAAACCAUCUCCCCAGGAGAguuuuagaGCUAGAAAUAGCAAGUUAAAAUAAGGCUAGUCCG | 838 |
| UUAUCAACUUGAAAAAGUGGCACCGAGUCGgugcACUACUCgCCGUCUCCUGGGGAGAUGGU | |
| U | |
| GAAACCAUCUCCCCAGGAGAguuuuagaGCUAGAAAUAGCAAGUUAAAAUAAGGCUAGUCCG | 839 |
| UUAUCAACUUGAAAAAGUGGCACCGAGUCGgugcCACUACUCgCCGUCUCCUGGGGAGA | |
| GAAACCAUCUCCCCAGGAGAguuuuagaGCUAGAAAUAGCAAGUUAAAAUAAGGCUAGUCCG | 840 |
| UUAUCAACUUGAAAAAGUGGCACCGAGUCGgugcCACUACUCgCCGUCUCCUGGGGAGAU | |
| GAAACCAUCUCCCCAGGAGAguuuuagaGCUAGAAAUAGCAAGUUAAAAUAAGGCUAGUCCG | 841 |
| UUAUCAACUUGAAAAAGUGGCACCGAGUCGgugcCACUACUCgCCGUCUCCUGGGGAGAUG | |
| GAAACCAUCUCCCCAGGAGAguuuuagaGCUAGAAAUAGCAAGUUAAAAUAAGGCUAGUCCG | 842 |
| UUAUCAACUUGAAAAAGUGGCACCGAGUCGgugcCACUACUCgCCGUCUCCUGGGGAGAUGG | |
| GAAACCAUCUCCCCAGGAGAguuuuagaGCUAGAAAUAGCAAGUUAAAAUAAGGCUAGUCCG | 843 |
| UUAUCAACUUGAAAAAGUGGCACCGAGUCGgugcCACUACUCgCCGUCUCCUGGGGAGAUGG | |
| U | |
| GAAACCAUCUCCCCAGGAGAguuuuagaGCUAGAAAUAGCAAGUUAAAAUAAGGCUAGUCCG | 844 |
| UUAUCAACUUGAAAAAGUGGCACCGAGUCGgugcCACUACUCgCCGUCUCCUGGGGAGAUGG | |
| UU | |
| GAAACCAUCUCCCCAGGAGAguuuuagaGCUAGAAAUAGCAAGUUAAAAUAAGGCUAGUCCG | 845 |
| UUAUCAACUUGAAAAAGUGGCACCGAGUCGgugcCCACUACUCgCCGUCUCCUGGGGAGA | |
| GAAACCAUCUCCCCAGGAGAguuuuagaGCUAGAAAUAGCAAGUUAAAAUAAGGCUAGUCCG | 846 |
| UUAUCAACUUGAAAAAGUGGCACCGAGUCGgugcCCACUACUCgCCGUCUCCUGGGGAGAU | |
| GAAACCAUCUCCCCAGGAGAguuuuagaGCUAGAAAUAGCAAGUUAAAAUAAGGCUAGUCCG | 847 |
| UUAUCAACUUGAAAAAGUGGCACCGAGUCGgugcCCACUACUCgCCGUCUCCUGGGGAGAUG | |
| GAAACCAUCUCCCCAGGAGAguuuuagaGCUAGAAAUAGCAAGUUAAAAUAAGGCUAGUCCG | 848 |
| UUAUCAACUUGAAAAAGUGGCACCGAGUCGgugcCCACUACUCgCCGUCUCCUGGGGAGAUG | |
| G | |
| GAAACCAUCUCCCCAGGAGAguuuuagaGCUAGAAAUAGCAAGUUAAAAUAAGGCUAGUCCG | 849 |
| UUAUCAACUUGAAAAAGUGGCACCGAGUCGgugcCCACUACUCgCCGUCUCCUGGGGAGAUG | |
| GU | |
| GAAACCAUCUCCCCAGGAGAguuuuagaGCUAGAAAUAGCAAGUUAAAAUAAGGCUAGUCCG | 850 |
| UUAUCAACUUGAAAAAGUGGCACCGAGUCGgugcCCACUACUCgCCGUCUCCUGGGGAGAUG | |
| GUU | |
| GAAACCAUCUCCCCAGGAGAguuuuagaGCUAGAAAUAGCAAGUUAAAAUAAGGCUAGUCCG | 851 |
| UUAUCAACUUGAAAAAGUGGCACCGAGUCGgugcGCCACUACUCgCCGUCUCCUGGGGAGA | |
| GAAACCAUCUCCCCAGGAGAguuuuagaGCUAGAAAUAGCAAGUUAAAAUAAGGCUAGUCCG | 852 |
| UUAUCAACUUGAAAAAGUGGCACCGAGUCGgugcGCCACUACUCgCCGUCUCCUGGGGAGAU | |
| GAAACCAUCUCCCCAGGAGAguuuuagaGCUAGAAAUAGCAAGUUAAAAUAAGGCUAGUCCG | 853 |
| UUAUCAACUUGAAAAAGUGGCACCGAGUCGgugcGCCACUACUCgCCGUCUCCUGGGGAGAU | |
| G | |
| GAAACCAUCUCCCCAGGAGAguuuuagaGCUAGAAAUAGCAAGUUAAAAUAAGGCUAGUCCG | 854 |
| UUAUCAACUUGAAAAAGUGGCACCGAGUCGgugcGCCACUACUCgCCGUCUCCUGGGGAGAU | |
| GG | |
| GAAACCAUCUCCCCAGGAGAguuuuagaGCUAGAAAUAGCAAGUUAAAAUAAGGCUAGUCCG | 855 |
| UUAUCAACUUGAAAAAGUGGCACCGAGUCGgugcGCCACUACUCgCCGUCUCCUGGGGAGAU | |
| GGU | |
| GAAACCAUCUCCCCAGGAGAguuuuagaGCUAGAAAUAGCAAGUUAAAAUAAGGCUAGUCCG | 856 |
| UUAUCAACUUGAAAAAGUGGCACCGAGUCGgugcGCCACUACUCgCCGUCUCCUGGGGAGAU | |
| GGUU | |
| GAAACCAUCUCCCCAGGAGAguuuuagaGCUAGAAAUAGCAAGUUAAAAUAAGGCUAGUCCG | 857 |
| UUAUCAACUUGAAAAAGUGGCACCGAGUCGgugcCGCCACUACUCgCCGUCUCCUGGGGAGA | |
| GAAACCAUCUCCCCAGGAGAguuuuagaGCUAGAAAUAGCAAGUUAAAAUAAGGCUAGUCCG | 858 |
| UUAUCAACUUGAAAAAGUGGCACCGAGUCGgugcCGCCACUACUCgCCGUCUCCUGGGGAGA | |
| U | |
| GAAACCAUCUCCCCAGGAGAguuuuagaGCUAGAAAUAGCAAGUUAAAAUAAGGCUAGUCCG | 859 |
| UUAUCAACUUGAAAAAGUGGCACCGAGUCGgugcCGCCACUACUCgCCGUCUCCUGGGGAGA | |
| UG | |
| GAAACCAUCUCCCCAGGAGAguuuuagaGCUAGAAAUAGCAAGUUAAAAUAAGGCUAGUCCG | 860 |
| UUAUCAACUUGAAAAAGUGGCACCGAGUCGgugcCGCCACUACUCgCCGUCUCCUGGGGAGA | |
| UGG | |
| GAAACCAUCUCCCCAGGAGAguuuuagaGCUAGAAAUAGCAAGUUAAAAUAAGGCUAGUCCG | 861 |
| UUAUCAACUUGAAAAAGUGGCACCGAGUCGgugcCGCCACUACUCgCCGUCUCCUGGGGAGA | |
| UGGU | |
| GAAACCAUCUCCCCAGGAGAguuuuagaGCUAGAAAUAGCAAGUUAAAAUAAGGCUAGUCCG | 862 |
| UUAUCAACUUGAAAAAGUGGCACCGAGUCGgugcCGCCACUACUCgCCGUCUCCUGGGGAGA | |
| UGGUU | |
| GAAACCAUCUCCCCAGGAGAguuuuagaGCUAGAAAUAGCAAGUUAAAAUAAGGCUAGUCCG | 863 |
| UUAUCAACUUGAAAAAGUGGCACCGAGUCGgugcGCGCCACUACUCgCCGUCUCCUGGGGAG | |
| A | |
| GAAACCAUCUCCCCAGGAGAguuuuagaGCUAGAAAUAGCAAGUUAAAAUAAGGCUAGUCCG | 864 |
| UUAUCAACUUGAAAAAGUGGCACCGAGUCGgugcGCGCCACUACUCgCCGUCUCCUGGGGAG | |
| AU | |
| GAAACCAUCUCCCCAGGAGAguuuuagaGCUAGAAAUAGCAAGUUAAAAUAAGGCUAGUCCG | 865 |
| UUAUCAACUUGAAAAAGUGGCACCGAGUCGgugcGCGCCACUACUCgCCGUCUCCUGGGGAG | |
| AUG | |
| GAAACCAUCUCCCCAGGAGAguuuuagaGCUAGAAAUAGCAAGUUAAAAUAAGGCUAGUCCG | 866 |
| UUAUCAACUUGAAAAAGUGGCACCGAGUCGgugcGCGCCACUACUCgCCGUCUCCUGGGGAG | |
| AUGG | |
| GAAACCAUCUCCCCAGGAGAguuuuagaGCUAGAAAUAGCAAGUUAAAAUAAGGCUAGUCCG | 867 |
| UUAUCAACUUGAAAAAGUGGCACCGAGUCGgugcGCGCCACUACUCgCCGUCUCCUGGGGAG | |
| AUGGU | |
| GAAACCAUCUCCCCAGGAGAguuuuagaGCUAGAAAUAGCAAGUUAAAAUAAGGCUAGUCCG | 868 |
| UUAUCAACUUGAAAAAGUGGCACCGAGUCGgugcGCGCCACUACUCgCCGUCUCCUGGGGAG | |
| AUGGUU | |
| GAAACCAUCUCCCCAGGAGAguuuuagaGCUAGAAAUAGCAAGUUAAAAUAAGGCUAGUCCG | 869 |
| UUAUCAACUUGAAAAAGUGGCACCGAGUCGgugcCGCGCCACUACUCgCCGUCUCCUGGGGA | |
| GA | |
| GAAACCAUCUCCCCAGGAGAguuuuagaGCUAGAAAUAGCAAGUUAAAAUAAGGCUAGUCCG | 870 |
| UUAUCAACUUGAAAAAGUGGCACCGAGUCGgugcCGCGCCACUACUCgCCGUCUCCUGGGGA | |
| GAU | |
| GAAACCAUCUCCCCAGGAGAguuuuagaGCUAGAAAUAGCAAGUUAAAAUAAGGCUAGUCCG | 871 |
| UUAUCAACUUGAAAAAGUGGCACCGAGUCGgugcCGCGCCACUACUCgCCGUCUCCUGGGGA | |
| GAUG | |
| GAAACCAUCUCCCCAGGAGAguuuuagaGCUAGAAAUAGCAAGUUAAAAUAAGGCUAGUCCG | 872 |
| UUAUCAACUUGAAAAAGUGGCACCGAGUCGgugcCGCGCCACUACUCgCCGUCUCCUGGGGA | |
| GAUGG | |
| GAAACCAUCUCCCCAGGAGAguuuuagaGCUAGAAAUAGCAAGUUAAAAUAAGGCUAGUCCG | 873 |
| UUAUCAACUUGAAAAAGUGGCACCGAGUCGgugcCGCGCCACUACUCgCCGUCUCCUGGGGA | |
| GAUGGU | |
| GAAACCAUCUCCCCAGGAGAguuuuagaGCUAGAAAUAGCAAGUUAAAAUAAGGCUAGUCCG | 874 |
| UUAUCAACUUGAAAAAGUGGCACCGAGUCGgugcCGCGCCACUACUCgCCGUCUCCUGGGGA | |
| GAUGGUU | |
| GAAACCAUCUCCCCAGGAGAguuuuagaGCUAGAAAUAGCAAGUUAAAAUAAGGCUAGUCCG | 875 |
| UUAUCAACUUGAAAAAGUGGCACCGAGUCGgugcGCGCGCCACUACUCgCCGUCUCCUGGGG | |
| AGA | |
| GAAACCAUCUCCCCAGGAGAguuuuagaGCUAGAAAUAGCAAGUUAAAAUAAGGCUAGUCCG | 876 |
| UUAUCAACUUGAAAAAGUGGCACCGAGUCGgugcGCGCGCCACUACUCgCCGUCUCCUGGGG | |
| AGAU | |
| GAAACCAUCUCCCCAGGAGAguuuuagaGCUAGAAAUAGCAAGUUAAAAUAAGGCUAGUCCG | 877 |
| UUAUCAACUUGAAAAAGUGGCACCGAGUCGgugcGCGCGCCACUACUCgCCGUCUCCUGGGG | |
| AGAUG | |
| GAAACCAUCUCCCCAGGAGAguuuuagaGCUAGAAAUAGCAAGUUAAAAUAAGGCUAGUCCG | 878 |
| UUAUCAACUUGAAAAAGUGGCACCGAGUCGgugcGCGCGCCACUACUCgCCGUCUCCUGGGG | |
| AGAUGG | |
| GAAACCAUCUCCCCAGGAGAguuuuagaGCUAGAAAUAGCAAGUUAAAAUAAGGCUAGUCCG | 879 |
| UUAUCAACUUGAAAAAGUGGCACCGAGUCGgugcGCGCGCCACUACUCgCCGUCUCCUGGGG | |
| AGAUGGU | |
| GAAACCAUCUCCCCAGGAGAguuuuagaGCUAGAAAUAGCAAGUUAAAAUAAGGCUAGUCCG | 880 |
| UUAUCAACUUGAAAAAGUGGCACCGAGUCGgugcGCGCGCCACUACUCgCCGUCUCCUGGGG | |
| AGAUGGUU | |
| GAAACCAUCUCCCCAGGAGAguuuuagaGCUAGAAAUAGCAAGUUAAAAUAAGGCUAGUCCG | 881 |
| UUAUCAACUUGAAAAAGUGGCACCGAGUCGgugcCGCGCGCCACUACUCgCCGUCUCCUGGG | |
| GAGA | |
| GAAACCAUCUCCCCAGGAGAguuuuagaGCUAGAAAUAGCAAGUUAAAAUAAGGCUAGUCCG | 882 |
| UUAUCAACUUGAAAAAGUGGCACCGAGUCGgugcCGCGCGCCACUACUCgCCGUCUCCUGGG | |
| GAGAU | |
| GAAACCAUCUCCCCAGGAGAguuuuagaGCUAGAAAUAGCAAGUUAAAAUAAGGCUAGUCCG | 883 |
| UUAUCAACUUGAAAAAGUGGCACCGAGUCGgugcCGCGCGCCACUACUCgCCGUCUCCUGGG | |
| GAGAUG | |
| GAAACCAUCUCCCCAGGAGAguuuuagaGCUAGAAAUAGCAAGUUAAAAUAAGGCUAGUCCG | 884 |
| UUAUCAACUUGAAAAAGUGGCACCGAGUCGgugcCGCGCGCCACUACUCgCCGUCUCCUGGG | |
| GAGAUGG | |
| GAAACCAUCUCCCCAGGAGAguuuuagaGCUAGAAAUAGCAAGUUAAAAUAAGGCUAGUCCG | 885 |
| UUAUCAACUUGAAAAAGUGGCACCGAGUCGgugcCGCGCGCCACUACUCgCCGUCUCCUGGG | |
| GAGAUGGU | |
| GAAACCAUCUCCCCAGGAGAguuuuagaGCUAGAAAUAGCAAGUUAAAAUAAGGCUAGUCCG | 886 |
| UUAUCAACUUGAAAAAGUGGCACCGAGUCGgugcCGCGCGCCACUACUCgCCGUCUCCUGGG | |
| GAGAUGGUU | |
| GAAACCAUCUCCCCAGGAGAguuuuagaGCUAGAAAUAGCAAGUUAAAAUAAGGCUAGUCCG | 887 |
| UUAUCAACUUGAAAAAGUGGCACCGAGUCGgugcCCGCGCGCCACUACUCgCCGUCUCCUGG | |
| GGAGA | |
| GAAACCAUCUCCCCAGGAGAguuuuagaGCUAGAAAUAGCAAGUUAAAAUAAGGCUAGUCCG | 888 |
| UUAUCAACUUGAAAAAGUGGCACCGAGUCGgugcCCGCGCGCCACUACUCgCCGUCUCCUGG | |
| GGAGAU | |
| GAAACCAUCUCCCCAGGAGAguuuuagaGCUAGAAAUAGCAAGUUAAAAUAAGGCUAGUCCG | 889 |
| UUAUCAACUUGAAAAAGUGGCACCGAGUCGgugcCCGCGCGCCACUACUCgCCGUCUCCUGG | |
| GGAGAUG | |
| GAAACCAUCUCCCCAGGAGAguuuuagaGCUAGAAAUAGCAAGUUAAAAUAAGGCUAGUCCG | 890 |
| UUAUCAACUUGAAAAAGUGGCACCGAGUCGgugcCCGCGCGCCACUACUCgCCGUCUCCUGG | |
| GGAGAUGG | |
| GAAACCAUCUCCCCAGGAGAguuuuagaGCUAGAAAUAGCAAGUUAAAAUAAGGCUAGUCCG | 891 |
| UUAUCAACUUGAAAAAGUGGCACCGAGUCGgugcCCGCGCGCCACUACUCgCCGUCUCCUGG | |
| GGAGAUGGU | |
| GAAACCAUCUCCCCAGGAGAguuuuagaGCUAGAAAUAGCAAGUUAAAAUAAGGCUAGUCCG | 892 |
| UUAUCAACUUGAAAAAGUGGCACCGAGUCGgugcCCGCGCGCCACUACUCgCCGUCUCCUGG | |
| GGAGAUGGUU | |
| GAAACCAUCUCCCCAGGAGAguuuuagaGCUAGAAAUAGCAAGUUAAAAUAAGGCUAGUCCG | 893 |
| UUAUCAACUUGAAAAAGUGGCACCGAGUCGgugcGCCGCGCGCCACUACUCgCCGUCUCCUG | |
| GGGAGA | |
| GAAACCAUCUCCCCAGGAGAguuuuagaGCUAGAAAUAGCAAGUUAAAAUAAGGCUAGUCCG | 894 |
| UUAUCAACUUGAAAAAGUGGCACCGAGUCGgugcGCCGCGCGCCACUACUCgCCGUCUCCUG | |
| GGGAGAU | |
| GAAACCAUCUCCCCAGGAGAguuuuagaGCUAGAAAUAGCAAGUUAAAAUAAGGCUAGUCCG | 895 |
| UUAUCAACUUGAAAAAGUGGCACCGAGUCGgugcGCCGCGCGCCACUACUCgCCGUCUCCUG | |
| GGGAGAUG | |
| GAAACCAUCUCCCCAGGAGAguuuuagaGCUAGAAAUAGCAAGUUAAAAUAAGGCUAGUCCG | 896 |
| UUAUCAACUUGAAAAAGUGGCACCGAGUCGgugcGCCGCGCGCCACUACUCgCCGUCUCCUG | |
| GGGAGAUGG | |
| GAAACCAUCUCCCCAGGAGAguuuuagaGCUAGAAAUAGCAAGUUAAAAUAAGGCUAGUCCG | 897 |
| UUAUCAACUUGAAAAAGUGGCACCGAGUCGgugcGCCGCGCGCCACUACUCgCCGUCUCCUG | |
| GGGAGAUGGU | |
| GAAACCAUCUCCCCAGGAGAguuuuagaGCUAGAAAUAGCAAGUUAAAAUAAGGCUAGUCCG | 898 |
| UUAUCAACUUGAAAAAGUGGCACCGAGUCGgugcGCCGCGCGCCACUACUCgCCGUCUCCUG | |
| GGGAGAUGGUU | |
| GAAACCAUCUCCCCAGGAGAguuuuagaGCUAGAAAUAGCAAGUUAAAAUAAGGCUAGUCCG | 899 |
| UUAUCAACUUGAAAAAGUGGCACCGAGUCGgugcCGCCGCGCGCCACUACUCgCCGUCUCCU | |
| GGGGAGA | |
| GAAACCAUCUCCCCAGGAGAguuuuagaGCUAGAAAUAGCAAGUUAAAAUAAGGCUAGUCCG | 900 |
| UUAUCAACUUGAAAAAGUGGCACCGAGUCGgugcCGCCGCGCGCCACUACUCgCCGUCUCCU | |
| GGGGAGAU | |
| GAAACCAUCUCCCCAGGAGAguuuuagaGCUAGAAAUAGCAAGUUAAAAUAAGGCUAGUCCG | 901 |
| UUAUCAACUUGAAAAAGUGGCACCGAGUCGgugcCGCCGCGCGCCACUACUCgCCGUCUCCU | |
| GGGGAGAUG | |
| GAAACCAUCUCCCCAGGAGAguuuuagaGCUAGAAAUAGCAAGUUAAAAUAAGGCUAGUCCG | 902 |
| UUAUCAACUUGAAAAAGUGGCACCGAGUCGgugcCGCCGCGCGCCACUACUCgCCGUCUCCU | |
| GGGGAGAUGG | |
| GAAACCAUCUCCCCAGGAGAguuuuagaGCUAGAAAUAGCAAGUUAAAAUAAGGCUAGUCCG | 903 |
| UUAUCAACUUGAAAAAGUGGCACCGAGUCGgugcCGCCGCGCGCCACUACUCgCCGUCUCCU | |
| GGGGAGAUGGU | |
| GAAACCAUCUCCCCAGGAGAguuuuagaGCUAGAAAUAGCAAGUUAAAAUAAGGCUAGUCCG | 904 |
| UUAUCAACUUGAAAAAGUGGCACCGAGUCGgugcCGCCGCGCGCCACUACUCgCCGUCUCCU | |
| GGGGAGAUGGUU | |
| GAAACCAUCUCCCCAGGAGAguuuuagaGCUAGAAAUAGCAAGUUAAAAUAAGGCUAGUCCG | 905 |
| UUAUCAACUUGAAAAAGUGGCACCGAGUCGgugcCCGCCGCGCGCCACUACUCgCCGUCUCC | |
| UGGGGAGA | |
| GAAACCAUCUCCCCAGGAGAguuuuagaGCUAGAAAUAGCAAGUUAAAAUAAGGCUAGUCCG | 906 |
| UUAUCAACUUGAAAAAGUGGCACCGAGUCGgugcCCGCCGCGCGCCACUACUCgCCGUCUCC | |
| UGGGGAGAU | |
| GAAACCAUCUCCCCAGGAGAguuuuagaGCUAGAAAUAGCAAGUUAAAAUAAGGCUAGUCCG | 907 |
| UUAUCAACUUGAAAAAGUGGCACCGAGUCGgugcCCGCCGCGCGCCACUACUCgCCGUCUCC | |
| UGGGGAGAUG | |
| GAAACCAUCUCCCCAGGAGAguuuuagaGCUAGAAAUAGCAAGUUAAAAUAAGGCUAGUCCG | 908 |
| UUAUCAACUUGAAAAAGUGGCACCGAGUCGgugcCCGCCGCGCGCCACUACUCgCCGUCUCC | |
| UGGGGAGAUGG | |
| GAAACCAUCUCCCCAGGAGAguuuuagaGCUAGAAAUAGCAAGUUAAAAUAAGGCUAGUCCG | 909 |
| UUAUCAACUUGAAAAAGUGGCACCGAGUCGgugcCCGCCGCGCGCCACUACUCgCCGUCUCC | |
| UGGGGAGAUGGU | |
| GAAACCAUCUCCCCAGGAGAguuuuagaGCUAGAAAUAGCAAGUUAAAAUAAGGCUAGUCCG | 910 |
| UUAUCAACUUGAAAAAGUGGCACCGAGUCGgugcCCGCCGCGCGCCACUACUCgCCGUCUCC | |
| UGGGGAGAUGGUU | |
| GAAACCAUCUCCCCAGGAGAguuuuagaGCUAGAAAUAGCAAGUUAAAAUAAGGCUAGUCCG | 911 |
| UUAUCAACUUGAAAAAGUGGCACCGAGUCGgugcGCCGCCGCGCGCCACUACUCgCCGUCUC | |
| CUGGGGAGA | |
| GAAACCAUCUCCCCAGGAGAguuuuagaGCUAGAAAUAGCAAGUUAAAAUAAGGCUAGUCCG | 912 |
| UUAUCAACUUGAAAAAGUGGCACCGAGUCGgugcGCCGCCGCGCGCCACUACUCgCCGUCUC | |
| CUGGGGAGAU | |
| GAAACCAUCUCCCCAGGAGAguuuuagaGCUAGAAAUAGCAAGUUAAAAUAAGGCUAGUCCG | 913 |
| UUAUCAACUUGAAAAAGUGGCACCGAGUCGgugcGCCGCCGCGCGCCACUACUCgCCGUCUC | |
| CUGGGGAGAUG | |
| GAAACCAUCUCCCCAGGAGAguuuuagaGCUAGAAAUAGCAAGUUAAAAUAAGGCUAGUCCG | 914 |
| UUAUCAACUUGAAAAAGUGGCACCGAGUCGgugcGCCGCCGCGCGCCACUACUCgCCGUCUC | |
| CUGGGGAGAUGG | |
| GAAACCAUCUCCCCAGGAGAguuuuagaGCUAGAAAUAGCAAGUUAAAAUAAGGCUAGUCCG | 915 |
| UUAUCAACUUGAAAAAGUGGCACCGAGUCGgugcGCCGCCGCGCGCCACUACUCgCCGUCUC | |
| CUGGGGAGAUGGU | |
| GAAACCAUCUCCCCAGGAGAguuuuagaGCUAGAAAUAGCAAGUUAAAAUAAGGCUAGUCCG | 916 |
| UUAUCAACUUGAAAAAGUGGCACCGAGUCGgugcGCCGCCGCGCGCCACUACUCgCCGUCUC | |
| CUGGGGAGAUGGUU | |
| GAAACCAUCUCCCCAGGAGAguuuuagaGCUAGAAAUAGCAAGUUAAAAUAAGGCUAGUCCG | 917 |
| UUAUCAACUUGAAAAAGUGGCACCGAGUCGgugcAGCCGCCGCGCGCCACUACUCgCCGUCU | |
| CCUGGGGAGA | |
| GAAACCAUCUCCCCAGGAGAguuuuagaGCUAGAAAUAGCAAGUUAAAAUAAGGCUAGUCCG | 918 |
| UUAUCAACUUGAAAAAGUGGCACCGAGUCGgugcAGCCGCCGCGCGCCACUACUCgCCGUCU | |
| CCUGGGGAGAU | |
| GAAACCAUCUCCCCAGGAGAguuuuagaGCUAGAAAUAGCAAGUUAAAAUAAGGCUAGUCCG | 919 |
| UUAUCAACUUGAAAAAGUGGCACCGAGUCGgugcAGCCGCCGCGCGCCACUACUCgCCGUCU | |
| CCUGGGGAGAUG | |
| GAAACCAUCUCCCCAGGAGAguuuuagaGCUAGAAAUAGCAAGUUAAAAUAAGGCUAGUCCG | 920 |
| UUAUCAACUUGAAAAAGUGGCACCGAGUCGgugcAGCCGCCGCGCGCCACUACUCgCCGUCU | |
| CCUGGGGAGAUGG | |
| GAAACCAUCUCCCCAGGAGAguuuuagaGCUAGAAAUAGCAAGUUAAAAUAAGGCUAGUCCG | 921 |
| UUAUCAACUUGAAAAAGUGGCACCGAGUCGgugcAGCCGCCGCGCGCCACUACUCgCCGUCU | |
| CCUGGGGAGAUGGU | |
| GAAACCAUCUCCCCAGGAGAguuuuagaGCUAGAAAUAGCAAGUUAAAAUAAGGCUAGUCCG | 922 |
| UUAUCAACUUGAAAAAGUGGCACCGAGUCGgugcAGCCGCCGCGCGCCACUACUCgCCGUCU | |
| CCUGGGGAGAUGGUU | |
| GAAACCAUCUCCCCAGGAGAguuuuagaGCUAGAAAUAGCAAGUUAAAAUAAGGCUAGUCCG | 923 |
| UUAUCAACUUGAAAAAGUGGCACCGAGUCGgugcGAGCCGCCGCGCGCCACUACUCgCCGUC | |
| UCCUGGGGAGA | |
| GAAACCAUCUCCCCAGGAGAguuuuagaGCUAGAAAUAGCAAGUUAAAAUAAGGCUAGUCCG | 924 |
| UUAUCAACUUGAAAAAGUGGCACCGAGUCGgugcGAGCCGCCGCGCGCCACUACUCgCCGUC | |
| UCCUGGGGAGAU | |
| GAAACCAUCUCCCCAGGAGAguuuuagaGCUAGAAAUAGCAAGUUAAAAUAAGGCUAGUCCG | 925 |
| UUAUCAACUUGAAAAAGUGGCACCGAGUCGgugcGAGCCGCCGCGCGCCACUACUCgCCGUC | |
| UCCUGGGGAGAUG | |
| GAAACCAUCUCCCCAGGAGAguuuuagaGCUAGAAAUAGCAAGUUAAAAUAAGGCUAGUCCG | 926 |
| UUAUCAACUUGAAAAAGUGGCACCGAGUCGgugcGAGCCGCCGCGCGCCACUACUCgCCGUC | |
| UCCUGGGGAGAUGG | |
| GAAACCAUCUCCCCAGGAGAguuuuagaGCUAGAAAUAGCAAGUUAAAAUAAGGCUAGUCCG | 927 |
| UUAUCAACUUGAAAAAGUGGCACCGAGUCGgugcGAGCCGCCGCGCGCCACUACUCgCCGUC | |
| UCCUGGGGAGAUGGU | |
| GAAACCAUCUCCCCAGGAGAguuuuagaGCUAGAAAUAGCAAGUUAAAAUAAGGCUAGUCCG | 928 |
| UUAUCAACUUGAAAAAGUGGCACCGAGUCGgugcGAGCCGCCGCGCGCCACUACUCgCCGUC | |
| UCCUGGGGAGAUGGUU | |
| GAAACCAUCUCCCCAGGAGAguuuuagaGCUAGAAAUAGCAAGUUAAAAUAAGGCUAGUCCG | 929 |
| UUAUCAACUUGAAAAAGUGGCACCGAGUCGgugcCGAGCCGCCGCGCGCCACUACUCgCCGU | |
| CUCCUGGGGAGA | |
| GAAACCAUCUCCCCAGGAGAguuuuagaGCUAGAAAUAGCAAGUUAAAAUAAGGCUAGUCCG | 930 |
| UUAUCAACUUGAAAAAGUGGCACCGAGUCGgugcCGAGCCGCCGCGCGCCACUACUCgCCGU | |
| CUCCUGGGGAGAU | |
| GAAACCAUCUCCCCAGGAGAguuuuagaGCUAGAAAUAGCAAGUUAAAAUAAGGCUAGUCCG | 931 |
| UUAUCAACUUGAAAAAGUGGCACCGAGUCGgugcCGAGCCGCCGCGCGCCACUACUCgCCGU | |
| CUCCUGGGGAGAUG | |
| GAAACCAUCUCCCCAGGAGAguuuuagaGCUAGAAAUAGCAAGUUAAAAUAAGGCUAGUCCG | 932 |
| UUAUCAACUUGAAAAAGUGGCACCGAGUCGgugcCGAGCCGCCGCGCGCCACUACUCgCCGU | |
| CUCCUGGGGAGAUGG | |
| GAAACCAUCUCCCCAGGAGAguuuuagaGCUAGAAAUAGCAAGUUAAAAUAAGGCUAGUCCG | 933 |
| UUAUCAACUUGAAAAAGUGGCACCGAGUCGgugcCGAGCCGCCGCGCGCCACUACUCgCCGU | |
| CUCCUGGGGAGAUGGU | |
| GAAACCAUCUCCCCAGGAGAguuuuagaGCUAGAAAUAGCAAGUUAAAAUAAGGCUAGUCCG | 934 |
| UUAUCAACUUGAAAAAGUGGCACCGAGUCGgugcCGAGCCGCCGCGCGCCACUACUCgCCGU | |
| CUCCUGGGGAGAUGGUU | |
| CAGGUGGAAACCAUCUCCCCguuuuagaGCUAGAAAUAGCAAGUUAAAAUAAGGCUAGUCCG | 935 |
| UUAUCAACUUGAAAAAGUGGCACCGAGUCGgugcCgCCGUCUCCUGGGGAGAUGGUUU | |
| CAGGUGGAAACCAUCUCCCCguuuuagaGCUAGAAAUAGCAAGUUAAAAUAAGGCUAGUCCG | 936 |
| UUAUCAACUUGAAAAAGUGGCACCGAGUCGgugcCgCCGUCUCCUGGGGAGAUGGUUUC | |
| CAGGUGGAAACCAUCUCCCCguuuuagaGCUAGAAAUAGCAAGUUAAAAUAAGGCUAGUCCG | 937 |
| UUAUCAACUUGAAAAAGUGGCACCGAGUCGgugcCgCCGUCUCCUGGGGAGAUGGUUUCC | |
| CAGGUGGAAACCAUCUCCCCguuuuagaGCUAGAAAUAGCAAGUUAAAAUAAGGCUAGUCCG | 938 |
| UUAUCAACUUGAAAAAGUGGCACCGAGUCGgugcCgCCGUCUCCUGGGGAGAUGGUUUCCA | |
| CAGGUGGAAACCAUCUCCCCguuuuagaGCUAGAAAUAGCAAGUUAAAAUAAGGCUAGUCCG | 939 |
| UUAUCAACUUGAAAAAGUGGCACCGAGUCGgugcCgCCGUCUCCUGGGGAGAUGGUUUCCAC | |
| CAGGUGGAAACCAUCUCCCCguuuuagaGCUAGAAAUAGCAAGUUAAAAUAAGGCUAGUCCG | 940 |
| UUAUCAACUUGAAAAAGUGGCACCGAGUCGgugcCgCCGUCUCCUGGGGAGAUGGUUUCCAC | |
| C | |
| CAGGUGGAAACCAUCUCCCCguuuuagaGCUAGAAAUAGCAAGUUAAAAUAAGGCUAGUCCG | 941 |
| UUAUCAACUUGAAAAAGUGGCACCGAGUCGgugcUCgCCGUCUCCUGGGGAGAUGGUUU | |
| CAGGUGGAAACCAUCUCCCCguuuuagaGCUAGAAAUAGCAAGUUAAAAUAAGGCUAGUCCG | 942 |
| UUAUCAACUUGAAAAAGUGGCACCGAGUCGgugcUCgCCGUCUCCUGGGGAGAUGGUUUC | |
| CAGGUGGAAACCAUCUCCCCguuuuagaGCUAGAAAUAGCAAGUUAAAAUAAGGCUAGUCCG | 943 |
| UUAUCAACUUGAAAAAGUGGCACCGAGUCGgugcUCgCCGUCUCCUGGGGAGAUGGUUUCC | |
| CAGGUGGAAACCAUCUCCCCguuuuagaGCUAGAAAUAGCAAGUUAAAAUAAGGCUAGUCCG | 944 |
| UUAUCAACUUGAAAAAGUGGCACCGAGUCGgugcUCgCCGUCUCCUGGGGAGAUGGUUUCCA | |
| CAGGUGGAAACCAUCUCCCCguuuuagaGCUAGAAAUAGCAAGUUAAAAUAAGGCUAGUCCG | 945 |
| UUAUCAACUUGAAAAAGUGGCACCGAGUCGgugcUCgCCGUCUCCUGGGGAGAUGGUUUCCA | |
| C | |
| CAGGUGGAAACCAUCUCCCCguuuuagaGCUAGAAAUAGCAAGUUAAAAUAAGGCUAGUCCG | 946 |
| UUAUCAACUUGAAAAAGUGGCACCGAGUCGgugcUCgCCGUCUCCUGGGGAGAUGGUUUCCA | |
| CC | |
| CAGGUGGAAACCAUCUCCCCguuuuagaGCUAGAAAUAGCAAGUUAAAAUAAGGCUAGUCCG | 947 |
| UUAUCAACUUGAAAAAGUGGCACCGAGUCGgugcCUCgCCGUCUCCUGGGGAGAUGGUUU | |
| CAGGUGGAAACCAUCUCCCCguuuuagaGCUAGAAAUAGCAAGUUAAAAUAAGGCUAGUCCG | 948 |
| UUAUCAACUUGAAAAAGUGGCACCGAGUCGgugcCUCgCCGUCUCCUGGGGAGAUGGUUUC | |
| CAGGUGGAAACCAUCUCCCCguuuuagaGCUAGAAAUAGCAAGUUAAAAUAAGGCUAGUCCG | 949 |
| UUAUCAACUUGAAAAAGUGGCACCGAGUCGgugcCUCgCCGUCUCCUGGGGAGAUGGUUUCC | |
| CAGGUGGAAACCAUCUCCCCguuuuagaGCUAGAAAUAGCAAGUUAAAAUAAGGCUAGUCCG | 950 |
| UUAUCAACUUGAAAAAGUGGCACCGAGUCGgugcCUCgCCGUCUCCUGGGGAGAUGGUUUCC | |
| A | |
| CAGGUGGAAACCAUCUCCCCguuuuagaGCUAGAAAUAGCAAGUUAAAAUAAGGCUAGUCCG | 951 |
| UUAUCAACUUGAAAAAGUGGCACCGAGUCGgugcCUCgCCGUCUCCUGGGGAGAUGGUUUCC | |
| AC | |
| CAGGUGGAAACCAUCUCCCCguuuuagaGCUAGAAAUAGCAAGUUAAAAUAAGGCUAGUCCG | 952 |
| UUAUCAACUUGAAAAAGUGGCACCGAGUCGgugcCUCgCCGUCUCCUGGGGAGAUGGUUUCC | |
| ACC | |
| CAGGUGGAAACCAUCUCCCCguuuuagaGCUAGAAAUAGCAAGUUAAAAUAAGGCUAGUCCG | 953 |
| UUAUCAACUUGAAAAAGUGGCACCGAGUCGgugcACUCgCCGUCUCCUGGGGAGAUGGUUU | |
| CAGGUGGAAACCAUCUCCCCguuuuagaGCUAGAAAUAGCAAGUUAAAAUAAGGCUAGUCCG | 954 |
| UUAUCAACUUGAAAAAGUGGCACCGAGUCGgugcACUCgCCGUCUCCUGGGGAGAUGGUUUC | |
| CAGGUGGAAACCAUCUCCCCguuuuagaGCUAGAAAUAGCAAGUUAAAAUAAGGCUAGUCCG | 955 |
| UUAUCAACUUGAAAAAGUGGCACCGAGUCGgugcACUCgCCGUCUCCUGGGGAGAUGGUUUC | |
| C | |
| CAGGUGGAAACCAUCUCCCCguuuuagaGCUAGAAAUAGCAAGUUAAAAUAAGGCUAGUCCG | 956 |
| UUAUCAACUUGAAAAAGUGGCACCGAGUCGgugcACUCgCCGUCUCCUGGGGAGAUGGUUUC | |
| CA | |
| CAGGUGGAAACCAUCUCCCCguuuuagaGCUAGAAAUAGCAAGUUAAAAUAAGGCUAGUCCG | 957 |
| UUAUCAACUUGAAAAAGUGGCACCGAGUCGgugcACUCgCCGUCUCCUGGGGAGAUGGUUUC | |
| CAC | |
| CAGGUGGAAACCAUCUCCCCguuuuagaGCUAGAAAUAGCAAGUUAAAAUAAGGCUAGUCCG | 958 |
| UUAUCAACUUGAAAAAGUGGCACCGAGUCGgugcACUCgCCGUCUCCUGGGGAGAUGGUUUC | |
| CACC | |
| CAGGUGGAAACCAUCUCCCCguuuuagaGCUAGAAAUAGCAAGUUAAAAUAAGGCUAGUCCG | 959 |
| UUAUCAACUUGAAAAAGUGGCACCGAGUCGgugcUACUCgCCGUCUCCUGGGGAGAUGGUUU | |
| CAGGUGGAAACCAUCUCCCCguuuuagaGCUAGAAAUAGCAAGUUAAAAUAAGGCUAGUCCG | 960 |
| UUAUCAACUUGAAAAAGUGGCACCGAGUCGgugcUACUCgCCGUCUCCUGGGGAGAUGGUUU | |
| C | |
| CAGGUGGAAACCAUCUCCCCguuuuagaGCUAGAAAUAGCAAGUUAAAAUAAGGCUAGUCCG | 961 |
| UUAUCAACUUGAAAAAGUGGCACCGAGUCGgugcUACUCgCCGUCUCCUGGGGAGAUGGUUU | |
| CC | |
| CAGGUGGAAACCAUCUCCCCguuuuagaGCUAGAAAUAGCAAGUUAAAAUAAGGCUAGUCCG | 962 |
| UUAUCAACUUGAAAAAGUGGCACCGAGUCGgugcUACUCgCCGUCUCCUGGGGAGAUGGUUU | |
| CCA | |
| CAGGUGGAAACCAUCUCCCCguuuuagaGCUAGAAAUAGCAAGUUAAAAUAAGGCUAGUCCG | 963 |
| UUAUCAACUUGAAAAAGUGGCACCGAGUCGgugcUACUCgCCGUCUCCUGGGGAGAUGGUUU | |
| CCAC | |
| CAGGUGGAAACCAUCUCCCCguuuuagaGCUAGAAAUAGCAAGUUAAAAUAAGGCUAGUCCG | 964 |
| UUAUCAACUUGAAAAAGUGGCACCGAGUCGgugcUACUCgCCGUCUCCUGGGGAGAUGGUUU | |
| CCACC | |
| CAGGUGGAAACCAUCUCCCCguuuuagaGCUAGAAAUAGCAAGUUAAAAUAAGGCUAGUCCG | 965 |
| UUAUCAACUUGAAAAAGUGGCACCGAGUCGgugcCUACUCgCCGUCUCCUGGGGAGAUGGUU | |
| U | |
| CAGGUGGAAACCAUCUCCCCguuuuagaGCUAGAAAUAGCAAGUUAAAAUAAGGCUAGUCCG | 966 |
| UUAUCAACUUGAAAAAGUGGCACCGAGUCGgugcCUACUCgCCGUCUCCUGGGGAGAUGGUU | |
| UC | |
| CAGGUGGAAACCAUCUCCCCguuuuagaGCUAGAAAUAGCAAGUUAAAAUAAGGCUAGUCCG | 967 |
| UUAUCAACUUGAAAAAGUGGCACCGAGUCGgugcCUACUCgCCGUCUCCUGGGGAGAUGGUU | |
| UCC | |
| CAGGUGGAAACCAUCUCCCCguuuuagaGCUAGAAAUAGCAAGUUAAAAUAAGGCUAGUCCG | 968 |
| UUAUCAACUUGAAAAAGUGGCACCGAGUCGgugcCUACUCgCCGUCUCCUGGGGAGAUGGUU | |
| UCCA | |
| CAGGUGGAAACCAUCUCCCCguuuuagaGCUAGAAAUAGCAAGUUAAAAUAAGGCUAGUCCG | 969 |
| UUAUCAACUUGAAAAAGUGGCACCGAGUCGgugcCUACUCgCCGUCUCCUGGGGAGAUGGUU | |
| UCCAC | |
| CAGGUGGAAACCAUCUCCCCguuuuagaGCUAGAAAUAGCAAGUUAAAAUAAGGCUAGUCCG | 970 |
| UUAUCAACUUGAAAAAGUGGCACCGAGUCGgugcCUACUCgCCGUCUCCUGGGGAGAUGGUU | |
| UCCACC | |
| CAGGUGGAAACCAUCUCCCCguuuuagaGCUAGAAAUAGCAAGUUAAAAUAAGGCUAGUCCG | 971 |
| UUAUCAACUUGAAAAAGUGGCACCGAGUCGgugcACUACUCgCCGUCUCCUGGGGAGAUGGU | |
| UU | |
| CAGGUGGAAACCAUCUCCCCguuuuagaGCUAGAAAUAGCAAGUUAAAAUAAGGCUAGUCCG | 972 |
| UUAUCAACUUGAAAAAGUGGCACCGAGUCGgugcACUACUCgCCGUCUCCUGGGGAGAUGGU | |
| UUC | |
| CAGGUGGAAACCAUCUCCCCguuuuagaGCUAGAAAUAGCAAGUUAAAAUAAGGCUAGUCCG | 973 |
| UUAUCAACUUGAAAAAGUGGCACCGAGUCGgugcACUACUCgCCGUCUCCUGGGGAGAUGGU | |
| UUCC | |
| CAGGUGGAAACCAUCUCCCCguuuuagaGCUAGAAAUAGCAAGUUAAAAUAAGGCUAGUCCG | 974 |
| UUAUCAACUUGAAAAAGUGGCACCGAGUCGgugcACUACUCgCCGUCUCCUGGGGAGAUGGU | |
| UUCCA | |
| CAGGUGGAAACCAUCUCCCCguuuuagaGCUAGAAAUAGCAAGUUAAAAUAAGGCUAGUCCG | 975 |
| UUAUCAACUUGAAAAAGUGGCACCGAGUCGgugcACUACUCgCCGUCUCCUGGGGAGAUGGU | |
| UUCCAC | |
| CAGGUGGAAACCAUCUCCCCguuuuagaGCUAGAAAUAGCAAGUUAAAAUAAGGCUAGUCCG | 976 |
| UUAUCAACUUGAAAAAGUGGCACCGAGUCGgugcACUACUCgCCGUCUCCUGGGGAGAUGGU | |
| UUCCACC | |
| CAGGUGGAAACCAUCUCCCCguuuuagaGCUAGAAAUAGCAAGUUAAAAUAAGGCUAGUCCG | 977 |
| UUAUCAACUUGAAAAAGUGGCACCGAGUCGgugcCACUACUCgCCGUCUCCUGGGGAGAUGG | |
| UUU | |
| CAGGUGGAAACCAUCUCCCCguuuuagaGCUAGAAAUAGCAAGUUAAAAUAAGGCUAGUCCG | 978 |
| UUAUCAACUUGAAAAAGUGGCACCGAGUCGgugcCACUACUCgCCGUCUCCUGGGGAGAUGG | |
| UUUC | |
| CAGGUGGAAACCAUCUCCCCguuuuagaGCUAGAAAUAGCAAGUUAAAAUAAGGCUAGUCCG | 979 |
| UUAUCAACUUGAAAAAGUGGCACCGAGUCGgugcCACUACUCgCCGUCUCCUGGGGAGAUGG | |
| UUUCC | |
| CAGGUGGAAACCAUCUCCCCguuuuagaGCUAGAAAUAGCAAGUUAAAAUAAGGCUAGUCCG | 980 |
| UUAUCAACUUGAAAAAGUGGCACCGAGUCGgugcCACUACUCgCCGUCUCCUGGGGAGAUGG | |
| UUUCCA | |
| CAGGUGGAAACCAUCUCCCCguuuuagaGCUAGAAAUAGCAAGUUAAAAUAAGGCUAGUCCG | 981 |
| UUAUCAACUUGAAAAAGUGGCACCGAGUCGgugcCACUACUCgCCGUCUCCUGGGGAGAUGG | |
| UUUCCAC | |
| CAGGUGGAAACCAUCUCCCCguuuuagaGCUAGAAAUAGCAAGUUAAAAUAAGGCUAGUCCG | 982 |
| UUAUCAACUUGAAAAAGUGGCACCGAGUCGgugcCACUACUCgCCGUCUCCUGGGGAGAUGG | |
| UUUCCACC | |
| CAGGUGGAAACCAUCUCCCCguuuuagaGCUAGAAAUAGCAAGUUAAAAUAAGGCUAGUCCG | 983 |
| UUAUCAACUUGAAAAAGUGGCACCGAGUCGgugcCCACUACUCgCCGUCUCCUGGGGAGAUG | |
| GUUU | |
| CAGGUGGAAACCAUCUCCCCguuuuagaGCUAGAAAUAGCAAGUUAAAAUAAGGCUAGUCCG | 984 |
| UUAUCAACUUGAAAAAGUGGCACCGAGUCGgugcCCACUACUCgCCGUCUCCUGGGGAGAUG | |
| GUUUC | |
| CAGGUGGAAACCAUCUCCCCguuuuagaGCUAGAAAUAGCAAGUUAAAAUAAGGCUAGUCCG | 985 |
| UUAUCAACUUGAAAAAGUGGCACCGAGUCGgugcCCACUACUCgCCGUCUCCUGGGGAGAUG | |
| GUUUCC | |
| CAGGUGGAAACCAUCUCCCCguuuuagaGCUAGAAAUAGCAAGUUAAAAUAAGGCUAGUCCG | 986 |
| UUAUCAACUUGAAAAAGUGGCACCGAGUCGgugcCCACUACUCgCCGUCUCCUGGGGAGAUG | |
| GUUUCCA | |
| CAGGUGGAAACCAUCUCCCCguuuuagaGCUAGAAAUAGCAAGUUAAAAUAAGGCUAGUCCG | 987 |
| UUAUCAACUUGAAAAAGUGGCACCGAGUCGgugcCCACUACUCgCCGUCUCCUGGGGAGAUG | |
| GUUUCCAC | |
| CAGGUGGAAACCAUCUCCCCguuuuagaGCUAGAAAUAGCAAGUUAAAAUAAGGCUAGUCCG | 988 |
| UUAUCAACUUGAAAAAGUGGCACCGAGUCGgugcCCACUACUCgCCGUCUCCUGGGGAGAUG | |
| GUUUCCACC | |
| CAGGUGGAAACCAUCUCCCCguuuuagaGCUAGAAAUAGCAAGUUAAAAUAAGGCUAGUCCG | 989 |
| UUAUCAACUUGAAAAAGUGGCACCGAGUCGgugcGCCACUACUCgCCGUCUCCUGGGGAGAU | |
| GGUUU | |
| CAGGUGGAAACCAUCUCCCCguuuuagaGCUAGAAAUAGCAAGUUAAAAUAAGGCUAGUCCG | 990 |
| UUAUCAACUUGAAAAAGUGGCACCGAGUCGgugcGCCACUACUCgCCGUCUCCUGGGGAGAU | |
| GGUUUC | |
| CAGGUGGAAACCAUCUCCCCguuuuagaGCUAGAAAUAGCAAGUUAAAAUAAGGCUAGUCCG | 991 |
| UUAUCAACUUGAAAAAGUGGCACCGAGUCGgugcGCCACUACUCgCCGUCUCCUGGGGAGAU | |
| GGUUUCC | |
| CAGGUGGAAACCAUCUCCCCguuuuagaGCUAGAAAUAGCAAGUUAAAAUAAGGCUAGUCCG | 992 |
| UUAUCAACUUGAAAAAGUGGCACCGAGUCGgugcGCCACUACUCgCCGUCUCCUGGGGAGAU | |
| GGUUUCCA | |
| CAGGUGGAAACCAUCUCCCCguuuuagaGCUAGAAAUAGCAAGUUAAAAUAAGGCUAGUCCG | 993 |
| UUAUCAACUUGAAAAAGUGGCACCGAGUCGgugcGCCACUACUCgCCGUCUCCUGGGGAGAU | |
| GGUUUCCAC | |
| CAGGUGGAAACCAUCUCCCCguuuuagaGCUAGAAAUAGCAAGUUAAAAUAAGGCUAGUCCG | 994 |
| UUAUCAACUUGAAAAAGUGGCACCGAGUCGgugcGCCACUACUCgCCGUCUCCUGGGGAGAU | |
| GGUUUCCACC | |
| CAGGUGGAAACCAUCUCCCCguuuuagaGCUAGAAAUAGCAAGUUAAAAUAAGGCUAGUCCG | 995 |
| UUAUCAACUUGAAAAAGUGGCACCGAGUCGgugcCGCCACUACUCgCCGUCUCCUGGGGAGA | |
| UGGUUU | |
| CAGGUGGAAACCAUCUCCCCguuuuagaGCUAGAAAUAGCAAGUUAAAAUAAGGCUAGUCCG | 996 |
| UUAUCAACUUGAAAAAGUGGCACCGAGUCGgugcCGCCACUACUCgCCGUCUCCUGGGGAGA | |
| UGGUUUC | |
| CAGGUGGAAACCAUCUCCCCguuuuagaGCUAGAAAUAGCAAGUUAAAAUAAGGCUAGUCCG | 997 |
| UUAUCAACUUGAAAAAGUGGCACCGAGUCGgugcCGCCACUACUCgCCGUCUCCUGGGGAGA | |
| UGGUUUCC | |
| CAGGUGGAAACCAUCUCCCCguuuuagaGCUAGAAAUAGCAAGUUAAAAUAAGGCUAGUCCG | 998 |
| UUAUCAACUUGAAAAAGUGGCACCGAGUCGgugcCGCCACUACUCgCCGUCUCCUGGGGAGA | |
| UGGUUUCCA | |
| CAGGUGGAAACCAUCUCCCCguuuuagaGCUAGAAAUAGCAAGUUAAAAUAAGGCUAGUCCG | 999 |
| UUAUCAACUUGAAAAAGUGGCACCGAGUCGgugcCGCCACUACUCgCCGUCUCCUGGGGAGA | |
| UGGUUUCCAC | |
| CAGGUGGAAACCAUCUCCCCguuuuagaGCUAGAAAUAGCAAGUUAAAAUAAGGCUAGUCCG | 1000 |
| UUAUCAACUUGAAAAAGUGGCACCGAGUCGgugcCGCCACUACUCgCCGUCUCCUGGGGAGA | |
| UGGUUUCCACC | |
| CAGGUGGAAACCAUCUCCCCguuuuagaGCUAGAAAUAGCAAGUUAAAAUAAGGCUAGUCCG | 1001 |
| UUAUCAACUUGAAAAAGUGGCACCGAGUCGgugcGCGCCACUACUCgCCGUCUCCUGGGGAG | |
| AUGGUUU | |
| CAGGUGGAAACCAUCUCCCCguuuuagaGCUAGAAAUAGCAAGUUAAAAUAAGGCUAGUCCG | 1002 |
| UUAUCAACUUGAAAAAGUGGCACCGAGUCGgugcGCGCCACUACUCgCCGUCUCCUGGGGAG | |
| AUGGUUUC | |
| CAGGUGGAAACCAUCUCCCCguuuuagaGCUAGAAAUAGCAAGUUAAAAUAAGGCUAGUCCG | 1003 |
| UUAUCAACUUGAAAAAGUGGCACCGAGUCGgugcGCGCCACUACUCgCCGUCUCCUGGGGAG | |
| AUGGUUUCC | |
| CAGGUGGAAACCAUCUCCCCguuuuagaGCUAGAAAUAGCAAGUUAAAAUAAGGCUAGUCCG | 1004 |
| UUAUCAACUUGAAAAAGUGGCACCGAGUCGgugcGCGCCACUACUCgCCGUCUCCUGGGGAG | |
| AUGGUUUCCA | |
| CAGGUGGAAACCAUCUCCCCguuuuagaGCUAGAAAUAGCAAGUUAAAAUAAGGCUAGUCCG | 1005 |
| UUAUCAACUUGAAAAAGUGGCACCGAGUCGgugcGCGCCACUACUCgCCGUCUCCUGGGGAG | |
| AUGGUUUCCAC | |
| CAGGUGGAAACCAUCUCCCCguuuuagaGCUAGAAAUAGCAAGUUAAAAUAAGGCUAGUCCG | 1006 |
| UUAUCAACUUGAAAAAGUGGCACCGAGUCGgugcGCGCCACUACUCgCCGUCUCCUGGGGAG | |
| AUGGUUUCCACC | |
| CAGGUGGAAACCAUCUCCCCguuuuagaGCUAGAAAUAGCAAGUUAAAAUAAGGCUAGUCCG | 1007 |
| UUAUCAACUUGAAAAAGUGGCACCGAGUCGgugcCGCGCCACUACUCgCCGUCUCCUGGGGA | |
| GAUGGUUU | |
| CAGGUGGAAACCAUCUCCCCguuuuagaGCUAGAAAUAGCAAGUUAAAAUAAGGCUAGUCCG | 1008 |
| UUAUCAACUUGAAAAAGUGGCACCGAGUCGgugcCGCGCCACUACUCgCCGUCUCCUGGGGA | |
| GAUGGUUUC | |
| CAGGUGGAAACCAUCUCCCCguuuuagaGCUAGAAAUAGCAAGUUAAAAUAAGGCUAGUCCG | 1009 |
| UUAUCAACUUGAAAAAGUGGCACCGAGUCGgugcCGCGCCACUACUCgCCGUCUCCUGGGGA | |
| GAUGGUUUCC | |
| CAGGUGGAAACCAUCUCCCCguuuuagaGCUAGAAAUAGCAAGUUAAAAUAAGGCUAGUCCG | 1010 |
| UUAUCAACUUGAAAAAGUGGCACCGAGUCGgugcCGCGCCACUACUCgCCGUCUCCUGGGGA | |
| GAUGGUUUCCA | |
| CAGGUGGAAACCAUCUCCCCguuuuagaGCUAGAAAUAGCAAGUUAAAAUAAGGCUAGUCCG | 1011 |
| UUAUCAACUUGAAAAAGUGGCACCGAGUCGgugcCGCGCCACUACUCgCCGUCUCCUGGGGA | |
| GAUGGUUUCCAC | |
| CAGGUGGAAACCAUCUCCCCguuuuagaGCUAGAAAUAGCAAGUUAAAAUAAGGCUAGUCCG | 1012 |
| UUAUCAACUUGAAAAAGUGGCACCGAGUCGgugcCGCGCCACUACUCgCCGUCUCCUGGGGA | |
| GAUGGUUUCCACC | |
| CAGGUGGAAACCAUCUCCCCguuuuagaGCUAGAAAUAGCAAGUUAAAAUAAGGCUAGUCCG | 1013 |
| UUAUCAACUUGAAAAAGUGGCACCGAGUCGgugcGCGCGCCACUACUCgCCGUCUCCUGGGG | |
| AGAUGGUUU | |
| CAGGUGGAAACCAUCUCCCCguuuuagaGCUAGAAAUAGCAAGUUAAAAUAAGGCUAGUCCG | 1014 |
| UUAUCAACUUGAAAAAGUGGCACCGAGUCGgugcGCGCGCCACUACUCgCCGUCUCCUGGGG | |
| AGAUGGUUUC | |
| CAGGUGGAAACCAUCUCCCCguuuuagaGCUAGAAAUAGCAAGUUAAAAUAAGGCUAGUCCG | 1015 |
| UUAUCAACUUGAAAAAGUGGCACCGAGUCGgugcGCGCGCCACUACUCgCCGUCUCCUGGGG | |
| AGAUGGUUUCC | |
| CAGGUGGAAACCAUCUCCCCguuuuagaGCUAGAAAUAGCAAGUUAAAAUAAGGCUAGUCCG | 1016 |
| UUAUCAACUUGAAAAAGUGGCACCGAGUCGgugcGCGCGCCACUACUCgCCGUCUCCUGGGG | |
| AGAUGGUUUCCA | |
| CAGGUGGAAACCAUCUCCCCguuuuagaGCUAGAAAUAGCAAGUUAAAAUAAGGCUAGUCCG | 1017 |
| UUAUCAACUUGAAAAAGUGGCACCGAGUCGgugcGCGCGCCACUACUCgCCGUCUCCUGGGG | |
| AGAUGGUUUCCAC | |
| CAGGUGGAAACCAUCUCCCCguuuuagaGCUAGAAAUAGCAAGUUAAAAUAAGGCUAGUCCG | 1018 |
| UUAUCAACUUGAAAAAGUGGCACCGAGUCGgugcGCGCGCCACUACUCgCCGUCUCCUGGGG | |
| AGAUGGUUUCCACC | |
| CAGGUGGAAACCAUCUCCCCguuuuagaGCUAGAAAUAGCAAGUUAAAAUAAGGCUAGUCCG | 1019 |
| UUAUCAACUUGAAAAAGUGGCACCGAGUCGgugcCGCGCGCCACUACUCgCCGUCUCCUGGG | |
| GAGAUGGUUU | |
| CAGGUGGAAACCAUCUCCCCguuuuagaGCUAGAAAUAGCAAGUUAAAAUAAGGCUAGUCCG | 1020 |
| UUAUCAACUUGAAAAAGUGGCACCGAGUCGgugcCGCGCGCCACUACUCgCCGUCUCCUGGG | |
| GAGAUGGUUUC | |
| CAGGUGGAAACCAUCUCCCCguuuuagaGCUAGAAAUAGCAAGUUAAAAUAAGGCUAGUCCG | 1021 |
| UUAUCAACUUGAAAAAGUGGCACCGAGUCGgugcCGCGCGCCACUACUCgCCGUCUCCUGGG | |
| GAGAUGGUUUCC | |
| CAGGUGGAAACCAUCUCCCCguuuuagaGCUAGAAAUAGCAAGUUAAAAUAAGGCUAGUCCG | 1022 |
| UUAUCAACUUGAAAAAGUGGCACCGAGUCGgugcCGCGCGCCACUACUCgCCGUCUCCUGGG | |
| GAGAUGGUUUCCA | |
| CAGGUGGAAACCAUCUCCCCguuuuagaGCUAGAAAUAGCAAGUUAAAAUAAGGCUAGUCCG | 1023 |
| UUAUCAACUUGAAAAAGUGGCACCGAGUCGgugcCGCGCGCCACUACUCgCCGUCUCCUGGG | |
| GAGAUGGUUUCCAC | |
| CAGGUGGAAACCAUCUCCCCguuuuagaGCUAGAAAUAGCAAGUUAAAAUAAGGCUAGUCCG | 1024 |
| UUAUCAACUUGAAAAAGUGGCACCGAGUCGgugcCGCGCGCCACUACUCgCCGUCUCCUGGG | |
| GAGAUGGUUUCCACC | |
| CAGGUGGAAACCAUCUCCCCguuuuagaGCUAGAAAUAGCAAGUUAAAAUAAGGCUAGUCCG | 1025 |
| UUAUCAACUUGAAAAAGUGGCACCGAGUCGgugcCCGCGCGCCACUACUCgCCGUCUCCUGG | |
| GGAGAUGGUUU | |
| CAGGUGGAAACCAUCUCCCCguuuuagaGCUAGAAAUAGCAAGUUAAAAUAAGGCUAGUCCG | 1026 |
| UUAUCAACUUGAAAAAGUGGCACCGAGUCGgugcCCGCGCGCCACUACUCgCCGUCUCCUGG | |
| GGAGAUGGUUUC | |
| CAGGUGGAAACCAUCUCCCCguuuuagaGCUAGAAAUAGCAAGUUAAAAUAAGGCUAGUCCG | 1027 |
| UUAUCAACUUGAAAAAGUGGCACCGAGUCGgugcCCGCGCGCCACUACUCgCCGUCUCCUGG | |
| GGAGAUGGUUUCC | |
| CAGGUGGAAACCAUCUCCCCguuuuagaGCUAGAAAUAGCAAGUUAAAAUAAGGCUAGUCCG | 1028 |
| UUAUCAACUUGAAAAAGUGGCACCGAGUCGgugcCCGCGCGCCACUACUCgCCGUCUCCUGG | |
| GGAGAUGGUUUCCA | |
| CAGGUGGAAACCAUCUCCCCguuuuagaGCUAGAAAUAGCAAGUUAAAAUAAGGCUAGUCCG | 1029 |
| UUAUCAACUUGAAAAAGUGGCACCGAGUCGgugcCCGCGCGCCACUACUCgCCGUCUCCUGG | |
| GGAGAUGGUUUCCAC | |
| CAGGUGGAAACCAUCUCCCCguuuuagaGCUAGAAAUAGCAAGUUAAAAUAAGGCUAGUCCG | 1030 |
| UUAUCAACUUGAAAAAGUGGCACCGAGUCGgugcCCGCGCGCCACUACUCgCCGUCUCCUGG | |
| GGAGAUGGUUUCCACC | |
| CAGGUGGAAACCAUCUCCCCguuuuagaGCUAGAAAUAGCAAGUUAAAAUAAGGCUAGUCCG | 1031 |
| UUAUCAACUUGAAAAAGUGGCACCGAGUCGgugcGCCGCGCGCCACUACUCgCCGUCUCCUG | |
| GGGAGAUGGUUU | |
| CAGGUGGAAACCAUCUCCCCguuuuagaGCUAGAAAUAGCAAGUUAAAAUAAGGCUAGUCCG | 1032 |
| UUAUCAACUUGAAAAAGUGGCACCGAGUCGgugcGCCGCGCGCCACUACUCgCCGUCUCCUG | |
| GGGAGAUGGUUUC | |
| CAGGUGGAAACCAUCUCCCCguuuuagaGCUAGAAAUAGCAAGUUAAAAUAAGGCUAGUCCG | 1033 |
| UUAUCAACUUGAAAAAGUGGCACCGAGUCGgugcGCCGCGCGCCACUACUCgCCGUCUCCUG | |
| GGGAGAUGGUUUCC | |
| CAGGUGGAAACCAUCUCCCCguuuuagaGCUAGAAAUAGCAAGUUAAAAUAAGGCUAGUCCG | 1034 |
| UUAUCAACUUGAAAAAGUGGCACCGAGUCGgugcGCCGCGCGCCACUACUCgCCGUCUCCUG | |
| GGGAGAUGGUUUCCA | |
| CAGGUGGAAACCAUCUCCCCguuuuagaGCUAGAAAUAGCAAGUUAAAAUAAGGCUAGUCCG | 1035 |
| UUAUCAACUUGAAAAAGUGGCACCGAGUCGgugcGCCGCGCGCCACUACUCgCCGUCUCCUG | |
| GGGAGAUGGUUUCCAC | |
| CAGGUGGAAACCAUCUCCCCguuuuagaGCUAGAAAUAGCAAGUUAAAAUAAGGCUAGUCCG | 1036 |
| UUAUCAACUUGAAAAAGUGGCACCGAGUCGgugcGCCGCGCGCCACUACUCgCCGUCUCCUG | |
| GGGAGAUGGUUUCCACC | |

TABLE 11
nickRNA (nRNA) Sequences.

| | DNA target | | | | | SEQ |
|---|---|---|---|---|---|---|
| | Sequence | SEQ | Spacer | SEQ | | ID |
| Descrip- | (including | ID | sequence | ID | nickRNA Sequence (nRNA) (no | NO |
| tion | PAM) | NO | (RNA) | NO | chemical modifications) | |
| nRNA | GCGCCCTGAG | 1037 | GCGCCCU | 1063 | GCGCCCUGAGGAGACAGAGAGUUUUAGA | 1089 |
| | GAGACAGAGA | | GAGGAGA | | GCUAGAAAUAGCAAGUUAAAAUAAGGCU | |
| | CGG | | CAGAGA | | AGUCCGUUAUCAACUUGAAAAAGUGGCA | |
| | | | | | CCGAGUCGGUGCUUUU | |
| nRNA | CGCCCTGAGG | 1038 | CGCCCUG | 1064 | CGCCCUGAGGAGACAGAGACGUUUUAGA | 1090 |
| | AGACAGAGAC | | AGGAGAC | | GCUAGAAAUAGCAAGUUAAAAUAAGGCU | |
| | GGG | | AGAGAC | | AGUCCGUUAUCAACUUGAAAAAGUGGCA | |
| | | | | | CCGAGUCGGUGCUUUU | |
| nRNA | GCATGCTGAG | 1039 | GCAUGCU | 1065 | GCAUGCUGAGCCGAUGCGCGGUUUUAGA | 1091 |
| | CCGATGCGCG | | GAGCCGA | | GCUAGAAAUAGCAAGUUAAAAUAAGGCU | |
| | CGG | | UGCGCG | | AGUCCGUUAUCAACUUGAAAAAGUGGCA | |
| | | | | | CCGAGUCGGUGCUUUU | |
| nRNA | TGCTGAGCCG | 1040 | UGCUGAG | 1066 | UGCUGAGCCGAUGCGCGCGGGUUUUAGA | 1092 |
| | ATGCGCGCGG | | CCGAUGC | | GCUAGAAAUAGCAAGUUAAAAUAAGGCU | |
| | CGG | | GCGCGG | | AGUCCGUUAUCAACUUGAAAAAGUGGCA | |
| | | | | | CCGAGUCGGUGCUUUU | |
| nRNA | GCCGATGCGC | 1041 | GCCGAUG | 1067 | GCCGAUGCGCGCGGCGGCAGGUUUUAGA | 1093 |
| | GCGGCGGCAG | | CGCGCGG | | GCUAGAAAUAGCAAGUUAAAAUAAGGCU | |
| | AGG | | CGGCAG | | AGUCCGUUAUCAACUUGAAAAAGUGGCA | |
| | | | | | CCGAGUCGGUGCUUUU | |
| nRNA | CGCCACTACT | 1042 | CGCCACU | 1068 | CGCCACUACUCACCGUCUCCGUUUUAGA | 1094 |
| | CACCGTCTCC | | ACUCACC | | GCUAGAAAUAGCAAGUUAAAAUAAGGCU | |
| | TGG | | GUCUCC | | AGUCCGUUAUCAACUUGAAAAAGUGGCA | |
| | | | | | CCGAGUCGGUGCUUUU | |
| nRNA | GCCACTACTC | 1043 | GCCACUA | 1069 | GCCACUACUCACCGUCUCCUGUUUUAGA | 1095 |
| | ACCGTCTCCT | | CUCACCG | | GCUAGAAAUAGCAAGUUAAAAUAAGGCU | |
| | GGG | | UCUCCU | | AGUCCGUUAUCAACUUGAAAAAGUGGCA | |
| | | | | | CCGAGUCGGUGCUUUU | |
| nRNA | CCACTACTCA | 1044 | CCACUAC | 1070 | CCACUACUCACCGUCUCCUGGUUUUAGA | 1096 |
| | CCGTCTCCTG | | UCACCGU | | GCUAGAAAUAGCAAGUUAAAAUAAGGCU | |
| | GGG | | CUCCUG | | AGUCCGUUAUCAACUUGAAAAAGUGGCA | |
| | | | | | CCGAGUCGGUGCUUUU | |
| nRNA | CTCACCGTCT | 1045 | CUCACCG | 1071 | CUCACCGUCUCCUGGGGAGAGUUUUAGA | 1097 |
| | CCTGGGGAGA | | UCUCCUG | | GCUAGAAAUAGCAAGUUAAAAUAAGGCU | |
| | TGG | | GGGAGA | | AGUCCGUUAUCAACUUGAAAAAGUGGCA | |
| | | | | | CCGAGUCGGUGCUUUU | |
| nRNA | GGTTTCCACC | 1046 | GGUUUCC | 1072 | GGUUUCCACCUGCACUCCCAGUUUUAGA | 1098 |
| | TGCACTCCCA | | ACCUGCA | | GCUAGAAAUAGCAAGUUAAAAUAAGGCU | |
| | TGG | | CUCCCA | | AGUCCGUUAUCAACUUGAAAAAGUGGCA | |
| | | | | | CCGAGUCGGUGCUUUU | |
| nRNA | TTCCACCTGC | 1047 | UUCCACC | 1073 | UUCCACCUGCACUCCCAUGGGUUUUAGA | 1099 |
| | ACTCCCATGG | | UGCACUC | | GCUAGAAAUAGCAAGUUAAAAUAAGGCU | |
| | CGG | | CCAUGG | | AGUCCGUUAUCAACUUGAAAAAGUGGCA | |
| | | | | | CCGAGUCGGUGCUUUU | |
| nRNA | CACCTGCACT | 1048 | CACCUGC | 1074 | CACCUGCACUCCCAUGGCGGGUUUUAGA | 1100 |
| | CCCATGGCGG | | ACUCCCA | | GCUAGAAAUAGCAAGUUAAAAUAAGGCU | |
| | CGG | | UGGCGG | | AGUCCGUUAUCAACUUGAAAAAGUGGCA | |
| | | | | | CCGAGUCGGUGCUUUU | |
| nRNA | CTGCACTCCC | 1049 | CUGCACU | 1075 | CUGCACUCCCAUGGCGGCGGGUUUUAGA | 1101 |
| | ATGGCGGCGG | | CCCAUGG | | GCUAGAAAUAGCAAGUUAAAAUAAGGCU | |
| | CGG | | CGGCGG | | AGUCCGUUAUCAACUUGAAAAAGUGGCA | |
| | | | | | CCGAGUCGGUGCUUUU | |
| nRNA | TGGCGGCGGC | 1050 | UGGCGGC | 1076 | UGGCGGCGGCGGACGCUGAGGUUUUAGA | 1102 |
| | GGACGCTGAG | | GGCGGAC | | GCUAGAAAUAGCAAGUUAAAAUAAGGCU | |
| | CGG | | GCUGAG | | AGUCCGUUAUCAACUUGAAAAAGUGGCA | |
| | | | | | CCGAGUCGGUGCUUUU | |
| nRNA | GGCGGCGGCG | 1051 | GGCGGCG | 1077 | GGCGGCGGCGGACGCUGAGCGUUUUAGA | 1103 |
| | GACGCTGAGC | | GCGGACG | | GCUAGAAAUAGCAAGUUAAAAUAAGGCU | |
| | GGG | | CUGAGC | | AGUCCGUUAUCAACUUGAAAAAGUGGCA | |
| | | | | | CCGAGUCGGUGCUUUU | |
| nRNA | GGCGGCGGAC | 1052 | GGCGGCG | 1078 | GGCGGCGGACGCUGAGCGGGGUUUUAGA | 1104 |
| | GCTGAGCGGG | | GACGCUG | | GCUAGAAAUAGCAAGUUAAAAUAAGGCU | |
| | CGG | | AGCGGG | | AGUCCGUUAUCAACUUGAAAAAGUGGCA | |
| | | | | | CCGAGUCGGUGCUUUU | |
| nRNA | GCGGCGGACG | 1053 | GCGGCGG | 1079 | GCGGCGGACGCUGAGCGGGCGUUUUAGA | 1105 |
| | CTGAGCGGGC | | ACGCUGA | | GCUAGAAAUAGCAAGUUAAAAUAAGGCU | |
| | GGG | | GCGGGC | | AGUCCGUUAUCAACUUGAAAAAGUGGCA | |
| | | | | | CCGAGUCGGUGCUUUU | |
| nRNA | GCGGACGCTG | 1054 | GCGGACG | 1080 | GCGGACGCUGAGCGGGGGGGGUUUUAGA | 1106 |
| | AGCGGGCGGG | | CUGAGCG | | GCUAGAAAUAGCAAGUUAAAAUAAGGCU | |
| | CGG | | GGCGGG | | AGUCCGUUAUCAACUUGAAAAAGUGGCA | |
| | | | | | CCGAGUCGGUGCUUUU | |
| nRNA | TGAGCGGGCG | 1055 | UGAGCGG | 1081 | UGAGCGGGCGGGCGGCGCGAGUUUUAGA | 1107 |
| | GGCGGCGCGA | | GCGGGCG | | GCUAGAAAUAGCAAGUUAAAAUAAGGCU | |
| | CGG | | GCGCGA | | AGUCCGUUAUCAACUUGAAAAAGUGGCA | |
| | | | | | CCGAGUCGGUGCUUUU | |
| nRNA | GAGCGGGCGG | 1056 | GAGCGGG | 1082 | GAGCGGGGGGCGGCGCGACGUUUUAGA | 1108 |
| | GCGGCGCGAC | | CGGGCGG | | GCUAGAAAUAGCAAGUUAAAAUAAGGCU | |
| | GGG | | CGCGAC | | AGUCCGUUAUCAACUUGAAAAAGUGGCA | |
| | | | | | CCGAGUCGGUGCUUUU | |
| nRNA | CGGGCGGGCG | 1057 | CGGGCGG | 1083 | CGGGCGGGCGGCGCGACGGGGUUUUAGA | 1109 |
| | GCGCGACGGG | | GCGGCGC | | GCUAGAAAUAGCAAGUUAAAAUAAGGCU | |
| | CGG | | GACGGG | | AGUCCGUUAUCAACUUGAAAAAGUGGCA | |
| | | | | | CCGAGUCGGUGCUUUU | |
| nRNA | GGGCGGCGCG | 1058 | GGGCGGC | 1084 | GGGCGGCGCGACGGGCGGCGGUUUUAGA | 1110 |
| | ACGGGCGGCG | | GCGACGG | | GCUAGAAAUAGCAAGUUAAAAUAAGGCU | |
| | TGG | | GCGGCG | | AGUCCGUUAUCAACUUGAAAAAGUGGCA | |
| | | | | | CCGAGUCGGUGCUUUU | |
| nRNA | CGCCACTACT | 1059 | CGCCACU | 1085 | CGCCACUACUCGCCGUCUCCGUUUUAGA | 1111 |
| (PE3b) | CGCCGTCTCC | | ACUCGCC | | GCUAGAAAUAGCAAGUUAAAAUAAGGCU | |
| | TGG | | GUCUCC | | AGUCCGUUAUCAACUUGAAAAAGUGGCA | |
| | | | | | CCGAGUCGGUGCUUUU | |
| nRNA | GCCACTACTC | 1060 | GCCACUA | 1086 | GCCACUACUCGCCGUCUCCUGUUUUAGA | 1112 |
| (PE3b) | GCCGTCTCCT | | CUCGCCG | | GCUAGAAAUAGCAAGUUAAAAUAAGGCU | |
| | GGG | | UCUCCU | | AGUCCGUUAUCAACUUGAAAAAGUGGCA | |
| | | | | | CCGAGUCGGUGCUUUU | |
| nRNA | CCACTACTCG | 1061 | CCACUAC | 1087 | CCACUACUCGCCGUCUCCUGGUUUUAGA | 1113 |
| (PE3b) | CCGTCTCCTG | | UCGCCGU | | GCUAGAAAUAGCAAGUUAAAAUAAGGCU | |
| | GGG | | CUCCUG | | AGUCCGUUAUCAACUUGAAAAAGUGGCA | |
| | | | | | CCGAGUCGGUGCUUUU | |
| nRNA | CTCGCCGTCT | 1062 | CUCGCCG | 1088 | CUCGCCGUCUCCUGGGGAGAGUUUUAGA | 1114 |
| (PE3b) | CCTGGGGAGA | | UCUCCUG | | GCUAGAAAUAGCAAGUUAAAAUAAGGCU | |
| | TGG | | GGGAGA | | AGUCCGUUAUCAACUUGAAAAAGUGGCA | |
| | | | | | CCGAGUCGGUGCUUUU | |

TABLE 12
Amino acid and nucleotide sequences for primer editor constructs.

| | | SEQ |
|---|---|---|
| | | ID |
| Description | Sequence | NO |
| Prime Editor | MKRTADGSEFESPKKKRKVDKKYSIGLDIGTNSVGWAVITDEYKVPSKKFKV | 1115 |
| 2 (PE2) | LGNTDRHSIKKNLIGALLFDSGETAEATRLKRTARRRYTRRKNRICYLQEIF | |
| amino acid | SNEMAKVDDSFFHRLEESFLVEEDKKHERHPIFGNIVDEVAYHEKYPTIYHL | |
| sequence | RKKLVDSTDKADLRLIYLALAHMIKFRGHFLIEGDLNPDNSDVDKLFIQLVQ | |
| | TYNQLFEENPINASGVDAKAILSARLSKSRRLENLIAQLPGEKKNGLFGNLI | |
| | ALSLGLTPNFKSNFDLAEDAKLQLSKDTYDDDLDNLLAQIGDQYADLFLAAK | |
| | NLSDAILLSDILRVNTEITKAPLSASMIKRYDEHHQDLTLLKALVRQQLPEK | |
| | YKEIFFDQSKNGYAGYIDGGASQEEFYKFIKPILEKMDGTEELLVKLNREDL | |
| | LRKQRTFDNGSIPHQIHLGELHAILRRQEDFYPFLKDNREKIEKILTFRIPY | |
| | YVGPLARGNSRFAWMTRKSEETITPWNFEEVVDKGASAQSFIERMTNFDKNL | |
| | PNEKVLPKHSLLYEYFTVYNELTKVKYVTEGMRKPAFLSGEQKKAIVDLLFK | |
| | TNRKVTVKQLKEDYFKKIECFDSVEISGVEDRFNASLGTYHDLLKIIKDKDF | |
| | LDNEENEDILEDIVLTLTLFEDREMIEERLKTYAHLFDDKVMKQLKRRRYTG | |
| | WGRLSRKLINGIRDKQSGKTILDFLKSDGFANRNFMQLIHDDSLTFKEDIQK | |
| | AQVSGQGDSLHEHIANLAGSPAIKKGILQTVKVVDELVKVMGRHKPENIVIE | |
| | MARENQTTQKGQKNSRERMKRIEEGIKELGSQILKEHPVENTQLQNEKLYLY | |
| | YLQNGRDMYVDQELDINRLSDYDVDAIVPQSFLKDDSIDNKVLTRSDKNRGK | |
| | SDNVPSEEVVKKMKNYWRQLLNAKLITQRKFDNLTKAERGGLSELDKAGFIK | |
| | RQLVETRQITKHVAQILDSRMNTKYDENDKLIREVKVITLKSKLVSDFRKDF | |
| | QFYKVREINNYHHAHDAYLNAVVGTALIKKYPKLESEFVYGDYKVYDVRKMI | |
| | AKSEQEIGKATAKYFFYSNIMNFFKTEITLANGEIRKRPLIETNGETGEIVW | |
| | DKGRDFATVRKVLSMPQVNIVKKTEVQTGGFSKESILPKRNSDKLIARKKDW | |
| | DPKKYGGFDSPTVAYSVLVVAKVEKGKSKKLKSVKELLGITIMERSSFEKNP | |
| | IDFLEAKGYKEVKKDLIIKLPKYSLFELENGRKRMLASAGELQKGNELALPS | |
| | KYVNFLYLASHYEKLKGSPEDNEQKQLFVEQHKHYLDEIIEQISEFSKRVIL | |
| | ADANLDKVLSAYNKHRDKPIREQAENIIHLFTLTNLGAPAAFKYFDTTIDRK | |
| | RYTSTKEVLDATLIHQSITGLYETRIDLSQLGGDSGGSSGGSSGSETPGTSE | |
| | SATPESSGGSSGGSSTLNIEDEYRLHETSKEPDVSLGSTWLSDFPQAWAETG | |
| | GMGLAVRQAPLIIPLKATSTPVSIKQYPMSQEARLGIKPHIQRLLDQGILVP | |
| | CQSPWNTPLLPVKKPGTNDYRPVQDLREVNKRVEDIHPTVPNPYNLLSGLPP | |
| | SHQWYTVLDLKDAFFCLRLHPTSQPLFAFEWRDPEMGISGQLTWTRLPQGFK | |
| | NSPTLFNEALHRDLADFRIQHPDLILLQYVDDLLLAATSELDCQQGTRALLQ | |
| | TLGNLGYRASAKKAQICQKQVKYLGYLLKEGQRWLTEARKETVMGQPTPKTP | |
| | RQLREFLGKAGFCRLFIPGFAEMAAPLYPLTKPGTLFNWGPDQQKAYQEIKQ | |
| | ALLTAPALGLPDLTKPFELFVDEKQGYAKGVLTQKLGPWRRPVAYLSKKLDP | |
| | VAAGWPPCLRMVAAIAVLTKDAGKLTMGQPLVILAPHAVEALVKQPPDRWLS | |
| | NARMTHYQALLLDTDRVQFGPVVALNPATLLPLPEEGLQHNCLDILAEAHGT | |
| | RPDLTDQPLPDADHTWYTDGSSLLQEGQRKAGAAVTTETEVIWAKALPAGTS | |
| | AQRAELIALTQALKMAEGKKLNVYTDSRYAFATAHIHGEIYRRRGWLTSEGK | |
| | EIKNKDEILALLKALFLPKRLSIIHCPGHQKGHSAEARGNRMADQAARKAAI | |
| | TETPDTSTLLIENSSPSGGSKRTADGSEFEPKKKRKV | |
| Prime Editor | ATGAAACGGACAGCCGACGGAAGCGAGTTCGAGTCACCAAAGAAGAAGCGGA | 1116 |
| 2 (PE2) | AAGTCGACAAGAAGTACAGCATCGGCCTGGACATCGGCACCAACTCTGTGGG | |
| nucleotide | CTGGGCCGTGATCACCGACGAGTACAAGGTGCCCAGCAAGAAATTCAAGGTG | |
| sequence | CTGGGCAACACCGACCGGCACAGCATCAAGAAGAACCTGATCGGAGCCCTGC | |
| | TGTTCGACAGCGGCGAAACAGCCGAGGCCACCCGGCTGAAGAGAACCGCCAG | |
| | AAGAAGATACACCAGACGGAAGAACCGGATCTGCTATCTGCAAGAGATCTTC | |
| | AGCAACGAGATGGCCAAGGTGGACGACAGCTTCTTCCACAGACTGGAAGAGT | |
| | CCTTCCTGGTGGAAGAGGATAAGAAGCACGAGCGGCACCCCATCTTCGGCAA | |
| | CATCGTGGACGAGGTGGCCTACCACGAGAAGTACCCCACCATCTACCACCTG | |
| | AGAAAGAAACTGGTGGACAGCACCGACAAGGCCGACCTGCGGCTGATCTATC | |
| | TGGCCCTGGCCCACATGATCAAGTTCCGGGGCCACTTCCTGATCGAGGGCGA | |
| | CCTGAACCCCGACAACAGCGACGTGGACAAGCTGTTCATCCAGCTGGTGCAG | |
| | ACCTACAACCAGCTGTTCGAGGAAAACCCCATCAACGCCAGCGGCGTGGACG | |
| | CCAAGGCCATCCTGTCTGCCAGACTGAGCAAGAGCAGACGGCTGGAAAATCT | |
| | GATCGCCCAGCTGCCCGGCGAGAAGAAGAATGGCCTGTTCGGAAACCTGATT | |
| | GCCCTGAGCCTGGGCCTGACCCCCAACTTCAAGAGCAACTTCGACCTGGCCG | |
| | AGGATGCCAAACTGCAGCTGAGCAAGGACACCTACGACGACGACCTGGACAA | |
| | CCTGCTGGCCCAGATCGGCGACCAGTACGCCGACCTGTTTCTGGCCGCCAAG | |
| | AACCTGTCCGACGCCATCCTGCTGAGCGACATCCTGAGAGTGAACACCGAGA | |
| | TCACCAAGGCCCCCCTGAGCGCCTCTATGATCAAGAGATACGACGAGCACCA | |
| | CCAGGACCTGACCCTGCTGAAAGCTCTCGTGCGGCAGCAGCTGCCTGAGAAG | |
| | TACAAAGAGATTTTCTTCGACCAGAGCAAGAACGGCTACGCCGGCTACATTG | |
| | ACGGCGGAGCCAGCCAGGAAGAGTTCTACAAGTTCATCAAGCCCATCCTGGA | |
| | AAAGATGGACGGCACCGAGGAACTGCTCGTGAAGCTGAACAGAGAGGACCTG | |
| | CTGCGGAAGCAGCGGACCTTCGACAACGGCAGCATCCCCCACCAGATCCACC | |
| | TGGGAGAGCTGCACGCCATTCTGCGGCGGCAGGAAGATTTTTACCCATTCCT | |
| | GAAGGACAACCGGGAAAAGATCGAGAAGATCCTGACCTTCCGCATCCCCTAC | |
| | TACGTGGGCCCTCTGGCCAGGGGAAACAGCAGATTCGCCTGGATGACCAGAA | |
| | AGAGCGAGGAAACCATCACCCCCTGGAACTTCGAGGAAGTGGTGGACAAGGG | |
| | CGCTTCCGCCCAGAGCTTCATCGAGCGGATGACCAACTTCGATAAGAACCTG | |
| | CCCAACGAGAAGGTGCTGCCCAAGCACAGCCTGCTGTACGAGTACTTCACCG | |
| | TGTATAACGAGCTGACCAAAGTGAAATACGTGACCGAGGGAATGAGAAAGCC | |
| | CGCCTTCCTGAGCGGCGAGCAGAAAAAGGCCATCGTGGACCTGCTGTTCAAG | |
| | ACCAACCGGAAAGTGACCGTGAAGCAGCTGAAAGAGGACTACTTCAAGAAAA | |
| | TCGAGTGCTTCGACTCCGTGGAAATCTCCGGCGTGGAAGATCGGTTCAACGC | |
| | CTCCCTGGGCACATACCACGATCTGCTGAAAATTATCAAGGACAAGGACTTC | |
| | CTGGACAATGAGGAAAACGAGGACATTCTGGAAGATATCGTGCTGACCCTGA | |
| | CACTGTTTGAGGACAGAGAGATGATCGAGGAACGGCTGAAAACCTATGCCCA | |
| | CCTGTTCGACGACAAAGTGATGAAGCAGCTGAAGCGGCGGAGATACACCGGC | |
| | TGGGGCAGGCTGAGCCGGAAGCTGATCAACGGCATCCGGGACAAGCAGTCCG | |
| | GCAAGACAATCCTGGATTTCCTGAAGTCCGACGGCTTCGCCAACAGAAACTT | |
| | CATGCAGCTGATCCACGACGACAGCCTGACCTTTAAAGAGGACATCCAGAAA | |
| | GCCCAGGTGTCCGGCCAGGGCGATAGCCTGCACGAGCACATTGCCAATCTGG | |
| | CCGGCAGCCCCGCCATTAAGAAGGGCATCCTGCAGACAGTGAAGGTGGTGGA | |
| | CGAGCTCGTGAAAGTGATGGGCCGGCACAAGCCCGAGAACATCGTGATCGAA | |
| | ATGGCCAGAGAGAACCAGACCACCCAGAAGGGACAGAAGAACAGCCGCGAGA | |
| | GAATGAAGCGGATCGAAGAGGGCATCAAAGAGCTGGGCAGCCAGATCCTGAA | |
| | AGAACACCCCGTGGAAAACACCCAGCTGCAGAACGAGAAGCTGTACCTGTAC | |
| | TACCTGCAGAATGGGGGGGATATGTACGTGGACCAGGAACTGGACATCAACC | |
| | GGCTGTCCGACTACGATGTGGACGCTATCGTGCCTCAGAGCTTTCTGAAGGA | |
| | CGACTCCATCGACAACAAGGTGCTGACCAGAAGCGACAAGAACCGGGGCAAG | |
| | AGCGACAACGTGCCCTCCGAAGAGGTCGTGAAGAAGATGAAGAACTACTGGC | |
| | GGCAGCTGCTGAACGCCAAGCTGATTACCCAGAGAAAGTTCGACAATCTGAC | |
| | CAAGGCCGAGAGAGGCGGCCTGAGCGAACTGGATAAGGCCGGCTTCATCAAG | |
| | AGACAGCTGGTGGAAACCCGGCAGATCACAAAGCACGTGGCACAGATCCTGG | |
| | ACTCCCGGATGAACACTAAGTACGACGAGAATGACAAGCTGATCCGGGAAGT | |
| | GAAAGTGATCACCCTGAAGTCCAAGCTGGTGTCCGATTTCCGGAAGGATTTC | |
| | CAGTTTTACAAAGTGCGCGAGATCAACAACTACCACCACGCCCACGACGCCT | |
| | ACCTGAACGCCGTCGTGGGAACCGCCCTGATCAAAAAGTACCCTAAGCTGGA | |
| | AAGCGAGTTCGTGTACGGCGACTACAAGGTGTACGACGTGCGGAAGATGATC | |
| | GCCAAGAGCGAGCAGGAAATCGGCAAGGCTACCGCCAAGTACTTCTTCTACA | |
| | GCAACATCATGAACTTTTTCAAGACCGAGATTACCCTGGCCAACGGCGAGAT | |
| | CCGGAAGCGGCCTCTGATCGAGACAAACGGCGAAACCGGGGAGATCGTGTGG | |
| | GATAAGGGCCGGGATTTTGCCACCGTGCGGAAAGTGCTGAGCATGCCCCAAG | |
| | TGAATATCGTGAAAAAGACCGAGGTGCAGACAGGCGGCTTCAGCAAAGAGTC | |
| | TATCCTGCCCAAGAGGAACAGCGATAAGCTGATCGCCAGAAAGAAGGACTGG | |
| | GACCCTAAGAAGTACGGCGGCTTCGACAGCCCCACCGTGGCCTATTCTGTGC | |
| | TGGTGGTGGCCAAAGTGGAAAAGGGCAAGTCCAAGAAACTGAAGAGTGTGAA | |
| | AGAGCTGCTGGGGATCACCATCATGGAAAGAAGCAGCTTCGAGAAGAATCCC | |
| | ATCGACTTTCTGGAAGCCAAGGGCTACAAAGAAGTGAAAAAGGACCTGATCA | |
| | TCAAGCTGCCTAAGTACTCCCTGTTCGAGCTGGAAAACGGCCGGAAGAGAAT | |
| | GCTGGCCTCTGCCGGCGAACTGCAGAAGGGAAACGAACTGGCCCTGCCCTCC | |
| | AAATATGTGAACTTCCTGTACCTGGCCAGCCACTATGAGAAGCTGAAGGGCT | |
| | CCCCCGAGGATAATGAGCAGAAACAGCTGTTTGTGGAACAGCACAAGCACTA | |
| | CCTGGACGAGATCATCGAGCAGATCAGCGAGTTCTCCAAGAGAGTGATCCTG | |
| | GCCGACGCTAATCTGGACAAAGTGCTGTCCGCCTACAACAAGCACCGGGATA | |
| | AGCCCATCAGAGAGCAGGCCGAGAATATCATCCACCTGTTTACCCTGACCAA | |
| | TCTGGGAGCCCCTGCCGCCTTCAAGTACTTTGACACCACCATCGACCGGAAG | |
| | AGGTACACCAGCACCAAAGAGGTGCTGGACGCCACCCTGATCCACCAGAGCA | |
| | TCACCGGCCTGTACGAGACACGGATCGACCTGTCTCAGCTGGGAGGTGACTC | |
| | TGGAGGATCTAGCGGAGGATCCTCTGGCAGCGAGACACCAGGAACAAGCGAG | |
| | TCAGCAACACCAGAGAGCAGTGGCGGCAGCAGCGGCGGCAGCAGCACCCTAA | |
| | ATATAGAAGATGAGTATCGGCTACATGAGACCTCAAAAGAGCCAGATGTTTC | |
| | TCTAGGGTCCACATGGCTGTCTGATTTTCCTCAGGCCTGGGCGGAAACCGGG | |
| | GGCATGGGACTGGCAGTTCGCCAAGCTCCTCTGATCATACCTCTGAAAGCAA | |
| | CCTCTACCCCCGTGTCCATAAAACAATACCCCATGTCACAAGAAGCCAGACT | |
| | GGGGATCAAGCCCCACATACAGAGACTGTTGGACCAGGGAATACTGGTACCC | |
| | TGCCAGTCCCCCTGGAACACGCCCCTGCTACCCGTTAAGAAACCAGGGACTA | |
| | ATGATTATAGGCCTGTCCAGGATCTGAGAGAAGTCAACAAGCGGGTGGAAGA | |
| | TATCCACCCCACCGTGCCCAACCCTTACAACCTCTTGAGCGGGCTCCCACCG | |
| | TCCCACCAGTGGTACACTGTGCTTGATTTAAAGGATGCCTTTTTCTGCCTGA | |
| | GACTCCACCCCACCAGTCAGCCTCTCTTCGCCTTTGAGTGGAGAGATCCAGA | |
| | GATGGGAATCTCAGGACAATTGACCTGGACCAGACTCCCACAGGGTTTCAAA | |
| | AACAGTCCCACCCTGTTTAATGAGGCACTGCACAGAGACCTAGCAGACTTCC | |
| | GGATCCAGCACCCAGACTTGATCCTGCTACAGTACGTGGATGACTTACTGCT | |
| | GGCCGCCACTTCTGAGCTAGACTGCCAACAAGGTACTCGGGCCCTGTTACAA | |
| | ACCCTAGGGAACCTCGGGTATCGGGCCTCGGCCAAGAAAGCCCAAATTTGCC | |
| | AGAAACAGGTCAAGTATCTGGGGTATCTTCTAAAAGAGGGTCAGAGATGGCT | |
| | GACTGAGGCCAGAAAAGAGACTGTGATGGGGCAGCCTACTCCTAAGACCCCT | |
| | CGACAACTAAGGGAGTTCCTAGGGAAGGCAGGCTTCTGTCGCCTCTTCATCC | |
| | CTGGGTTTGCAGAAATGGCAGCCCCCCTGTACCCTCTCACCAAACCGGGGAC | |
| | TCTGTTTAATTGGGGCCCAGACCAACAAAAGGCCTATCAAGAAATCAAGCAA | |
| | GCTCTTCTAACTGCCCCAGCCCTGGGGTTGCCAGATTTGACTAAGCCCTTTG | |
| | AACTCTTTGTCGACGAGAAGCAGGGCTACGCCAAAGGTGTCCTAACGCAAAA | |
| | ACTGGGACCTTGGCGTCGGCCGGTGGCCTACCTGTCCAAAAAGCTAGACCCA | |
| | GTAGCAGCTGGGTGGCCCCCTTGCCTACGGATGGTAGCAGCCATTGCCGTAC | |
| | TGACAAAGGATGCAGGCAAGCTAACCATGGGACAGCCACTAGTCATTCTGGC | |
| | CCCCCATGCAGTAGAGGCACTAGTCAAACAACCCCCCGACCGCTGGCTTTCC | |
| | AACGCCCGGATGACTCACTATCAGGCCTTGCTTTTGGACACGGACCGGGTCC | |
| | AGTTCGGACCGGTGGTAGCCCTGAACCCGGCTACGCTGCTCCCACTGCCTGA | |
| | GGAAGGGCTGCAACACAACTGCCTTGATATCCTGGCCGAAGCCCACGGAACC | |
| | CGACCCGACCTAACGGACCAGCCGCTCCCAGACGCCGACCACACCTGGTACA | |
| | CGGATGGAAGCAGTCTCTTACAAGAGGGACAGCGTAAGGCGGGAGCTGCGGT | |
| | GACCACCGAGACCGAGGTAATCTGGGCTAAAGCCCTGCCAGCCGGGACATCC | |
| | GCTCAGCGGGCTGAACTGATAGCACTCACCCAGGCCCTAAAGATGGCAGAAG | |
| | GTAAGAAGCTAAATGTTTATACTGATAGCCGTTATGCTTTTGCTACTGCCCA | |
| | TATCCATGGAGAAATATACAGAAGGCGTGGGTGGCTCACATCAGAAGGCAAA | |
| | GAGATCAAAAATAAAGACGAGATCTTGGCCCTACTAAAAGCCCTCTTTCTGC | |
| | CCAAAAGACTTAGCATAATCCATTGTCCAGGACATCAAAAGGGACACAGCGC | |
| | CGAGGCTAGAGGCAACCGGATGGCTGACCAAGCGGCCCGAAAGGCAGCCATC | |
| | ACAGAGACTCCAGACACCTCTACCCTCCTCATAGAAAATTCATCACCCTCTG | |
| | GCGGCTCAAAAAGAACCGCCGACGGCAGCGAATTCGAGCCCAAGAAGAAGAG | |
| | GAAAGTCTAA | |
| Prime Editor | MKRTADGSEFESPKKKRKVDKKYSIGLDIGTNSVGWAVITDEYKVPSKKFKV | 1117 |
| 3 (PE3) | LGNTDRHSIKKNLIGALLFDSGETAEATRLKRTARRRYTRRKNRICYLQEIF | |
| amino acid | SNEMAKVDDSFFHRLEESFLVEEDKKHERHPIFGNIVDEVAYHEKYPTIYHL | |
| sequence | RKKLVDSTDKADLRLIYLALAHMIKFRGHFLIEGDLNPDNSDVDKLFIQLVQ | |
| | TYNQLFEENPINASGVDAKAILSARLSKSRRLENLIAQLPGEKKNGLFGNLI | |
| | ALSLGLTPNFKSNFDLAEDAKLQLSKDTYDDDLDNLLAQIGDQYADLFLAAK | |
| | NLSDAILLSDILRVNTEITKAPLSASMIKRYDEHHQDLTLLKALVRQQLPEK | |
| | YKEIFFDQSKNGYAGYIDGGASQEEFYKFIKPILEKMDGTEELLVKLNREDL | |
| | LRKQRTFDNGSIPHQIHLGELHAILRRQEDFYPFLKDNREKIEKILTFRIPY | |
| | YVGPLARGNSRFAWMTRKSEETITPWNFEEVVDKGASAQSFIERMTNFDKNL | |
| | PNEKVLPKHSLLYEYFTVYNELTKVKYVTEGMRKPAFLSGEQKKAIVDLLFK | |
| | TNRKVTVKQLKEDYFKKIECFDSVEISGVEDRFNASLGTYHDLLKIIKDKDF | |
| | LDNEENEDILEDIVLTLTLFEDREMIEERLKTYAHLFDDKVMKQLKRRRYTG | |
| | WGRLSRKLINGIRDKQSGKTILDFLKSDGFANRNFMQLIHDDSLTFKEDIQK | |
| | AQVSGQGDSLHEHIANLAGSPAIKKGILQTVKVVDELVKVMGRHKPENIVIE | |
| | MARENQTTQKGQKNSRERMKRIEEGIKELGSQILKEHPVENTQLQNEKLYLY | |
| | YLQNGRDMYVDQELDINRLSDYDVDAIVPQSFLKDDSIDNKVLTRSDKNRGK | |
| | SDNVPSEEVVKKMKNYWRQLLNAKLITQRKFDNLTKAERGGLSELDKAGFIK | |
| | RQLVETRQITKHVAQILDSRMNTKYDENDKLIREVKVITLKSKLVSDFRKDF | |
| | QFYKVREINNYHHAHDAYLNAVVGTALIKKYPKLESEFVYGDYKVYDVRKMI | |
| | AKSEQEIGKATAKYFFYSNIMNFFKTEITLANGEIRKRPLIETNGETGEIVW | |
| | DKGRDFATVRKVLSMPQVNIVKKTEVQTGGFSKESILPKRNSDKLIARKKDW | |
| | DPKKYGGFDSPTVAYSVLVVAKVEKGKSKKLKSVKELLGITIMERSSFEKNP | |
| | IDFLEAKGYKEVKKDLIIKLPKYSLFELENGRKRMLASAGELQKGNELALPS | |
| | KYVNFLYLASHYEKLKGSPEDNEQKQLFVEQHKHYLDEIIEQISEFSKRVIL | |
| | ADANLDKVLSAYNKHRDKPIREQAENIIHLFTLINLGAPAAFKYFDTTIDRK | |
| | RYTSTKEVLDATLIHQSITGLYETRIDLSQLGGDSGGSEAAAKEAAAKEAAA | |
| | KEAAAKSGGSTLNIEDEYRLHETSKEPDVSLGSTWLSDFPQAWAETGGMGLA | |
| | VRQAPLIIPLKATSTPVSIKQYPMSQEARLGIKPHIQRLLDQGILVPCQSPW | |
| | NTPLLPVKKPGTNDYRPVQDLREVNKRVEDIHPTVPNPYNLLSGLPPSHQWY | |
| | TVLDLKDAFFCLRLHPTSQPLFAFEWRDPEMGISGQLTWTRLPQGFKNSPTL | |
| | FNEALHRDLADFRIQHPDLILLQYVDDLLLAATSELDCQQGTRALLQTLGNL | |
| | GYRASAKKAQICQKQVKYLGYLLKEGQRWLTEARKETVMGQPTPKTPRQLRE | |
| | FLGKAGFCRLFIPGFAEMAAPLYPLTKPGTLFNWGPDQQKAYQEIKQALLTA | |
| | PALGLPDLTKPFELFVDEKQGYAKGVLTQKLGPWRRPVAYLSKKLDPVAAGW | |
| | PPCLRMVAAIAVLTKDAGKLTMGQPLVILAPHAVEALVKQPPDRWLSNARMT | |
| | HYQALLLDTDRVQFGPVVALNPATLLPLPEEGLQHNCLDILAEAHGGGSKRT | |
| | ADGSEFEPKKKRKV | |
| Prime Editor | ATGAAACGGACAGCCGACGGAAGCGAGTTCGAGTCACCAAAGAAGAAGCGGA | 1118 |
| 3 (PE3) | AAGTCGACAAGAAGTACAGCATCGGCCTGGACATCGGCACCAACTCTGTGGG | |
| nucleotide | CTGGGCCGTGATCACCGACGAGTACAAGGTGCCCAGCAAGAAATTCAAGGTG | |
| sequence | CTGGGCAACACCGACCGGCACAGCATCAAGAAGAACCTGATCGGAGCCCTGC | |
| | TGTTCGACAGCGGCGAAACAGCCGAGGCCACCCGGCTGAAGAGAACCGCCAG | |
| | AAGAAGATACACCAGACGGAAGAACCGGATCTGCTATCTGCAAGAGATCTTC | |
| | AGCAACGAGATGGCCAAGGTGGACGACAGCTTCTTCCACAGACTGGAAGAGT | |
| | CCTTCCTGGTGGAAGAGGATAAGAAGCACGAGCGGCACCCCATCTTCGGCAA | |
| | CATCGTGGACGAGGTGGCCTACCACGAGAAGTACCCCACCATCTACCACCTG | |
| | AGAAAGAAACTGGTGGACAGCACCGACAAGGCCGACCTGCGGCTGATCTATC | |
| | TGGCCCTGGCCCACATGATCAAGTTCCGGGGCCACTTCCTGATCGAGGGCGA | |
| | CCTGAACCCCGACAACAGCGACGTGGACAAGCTGTTCATCCAGCTGGTGCAG | |
| | ACCTACAACCAGCTGTTCGAGGAAAACCCCATCAACGCCAGCGGCGTGGACG | |
| | CCAAGGCCATCCTGTCTGCCAGACTGAGCAAGAGCAGACGGCTGGAAAATCT | |
| | GATCGCCCAGCTGCCCGGCGAGAAGAAGAATGGCCTGTTCGGAAACCTGATT | |
| | GCCCTGAGCCTGGGCCTGACCCCCAACTTCAAGAGCAACTTCGACCTGGCCG | |
| | AGGATGCCAAACTGCAGCTGAGCAAGGACACCTACGACGACGACCTGGACAA | |
| | CCTGCTGGCCCAGATCGGCGACCAGTACGCCGACCTGTTTCTGGCCGCCAAG | |
| | AACCTGTCCGACGCCATCCTGCTGAGCGACATCCTGAGAGTGAACACCGAGA | |
| | TCACCAAGGCCCCCCTGAGCGCCTCTATGATCAAGAGATACGACGAGCACCA | |
| | CCAGGACCTGACCCTGCTGAAAGCTCTCGTGCGGCAGCAGCTGCCTGAGAAG | |
| | TACAAAGAGATTTTCTTCGACCAGAGCAAGAACGGCTACGCCGGCTACATTG | |
| | ACGGCGGAGCCAGCCAGGAAGAGTTCTACAAGTTCATCAAGCCCATCCTGGA | |
| | AAAGATGGACGGCACCGAGGAACTGCTCGTGAAGCTGAACAGAGAGGACCTG | |
| | CTGCGGAAGCAGCGGACCTTCGACAACGGCAGCATCCCCCACCAGATCCACC | |
| | TGGGAGAGCTGCACGCCATTCTGCGGCGGCAGGAAGATTTTTACCCATTCCT | |
| | GAAGGACAACCGGGAAAAGATCGAGAAGATCCTGACCTTCCGCATCCCCTAC | |
| | TACGTGGGCCCTCTGGCCAGGGGAAACAGCAGATTCGCCTGGATGACCAGAA | |
| | AGAGCGAGGAAACCATCACCCCCTGGAACTTCGAGGAAGTGGTGGACAAGGG | |
| | CGCTTCCGCCCAGAGCTTCATCGAGCGGATGACCAACTTCGATAAGAACCTG | |
| | CCCAACGAGAAGGTGCTGCCCAAGCACAGCCTGCTGTACGAGTACTTCACCG | |
| | TGTATAACGAGCTGACCAAAGTGAAATACGTGACCGAGGGAATGAGAAAGCC | |
| | CGCCTTCCTGAGCGGCGAGCAGAAAAAGGCCATCGTGGACCTGCTGTTCAAG | |
| | ACCAACCGGAAAGTGACCGTGAAGCAGCTGAAAGAGGACTACTTCAAGAAAA | |
| | TCGAGTGCTTCGACTCCGTGGAAATCTCCGGCGTGGAAGATCGGTTCAACGC | |
| | CTCCCTGGGCACATACCACGATCTGCTGAAAATTATCAAGGACAAGGACTTC | |
| | CTGGACAATGAGGAAAACGAGGACATTCTGGAAGATATCGTGCTGACCCTGA | |
| | CACTGTTTGAGGACAGAGAGATGATCGAGGAACGGCTGAAAACCTATGCCCA | |
| | CCTGTTCGACGACAAAGTGATGAAGCAGCTGAAGCGGCGGAGATACACCGGC | |
| | TGGGGCAGGCTGAGCCGGAAGCTGATCAACGGCATCCGGGACAAGCAGTCCG | |
| | GCAAGACAATCCTGGATTTCCTGAAGTCCGACGGCTTCGCCAACAGAAACTT | |
| | CATGCAGCTGATCCACGACGACAGCCTGACCTTTAAAGAGGACATCCAGAAA | |
| | GCCCAGGTGTCCGGCCAGGGCGATAGCCTGCACGAGCACATTGCCAATCTGG | |
| | CCGGCAGCCCCGCCATTAAGAAGGGCATCCTGCAGACAGTGAAGGTGGTGGA | |
| | CGAGCTCGTGAAAGTGATGGGCCGGCACAAGCCCGAGAACATCGTGATCGAA | |
| | ATGGCCAGAGAGAACCAGACCACCCAGAAGGGACAGAAGAACAGCCGCGAGA | |
| | GAATGAAGCGGATCGAAGAGGGCATCAAAGAGCTGGGCAGCCAGATCCTGAA | |
| | AGAACACCCCGTGGAAAACACCCAGCTGCAGAACGAGAAGCTGTACCTGTAC | |
| | TACCTGCAGAATGGGGGGGATATGTACGTGGACCAGGAACTGGACATCAACC | |
| | GGCTGTCCGACTACGATGTGGACGCTATCGTGCCTCAGAGCTTTCTGAAGGA | |
| | CGACTCCATCGACAACAAGGTGCTGACCAGAAGCGACAAGAACCGGGGCAAG | |
| | AGCGACAACGTGCCCTCCGAAGAGGTCGTGAAGAAGATGAAGAACTACTGGC | |
| | GGCAGCTGCTGAACGCCAAGCTGATTACCCAGAGAAAGTTCGACAATCTGAC | |
| | CAAGGCCGAGAGAGGCGGCCTGAGCGAACTGGATAAGGCCGGCTTCATCAAG | |
| | AGACAGCTGGTGGAAACCCGGCAGATCACAAAGCACGTGGCACAGATCCTGG | |
| | ACTCCCGGATGAACACTAAGTACGACGAGAATGACAAGCTGATCCGGGAAGT | |
| | GAAAGTGATCACCCTGAAGTCCAAGCTGGTGTCCGATTTCCGGAAGGATTTC | |
| | CAGTTTTACAAAGTGCGCGAGATCAACAACTACCACCACGCCCACGACGCCT | |
| | ACCTGAACGCCGTCGTGGGAACCGCCCTGATCAAAAAGTACCCTAAGCTGGA | |
| | AAGCGAGTTCGTGTACGGCGACTACAAGGTGTACGACGTGCGGAAGATGATC | |
| | GCCAAGAGCGAGCAGGAAATCGGCAAGGCTACCGCCAAGTACTTCTTCTACA | |
| | GCAACATCATGAACTTTTTCAAGACCGAGATTACCCTGGCCAACGGCGAGAT | |
| | CCGGAAGCGGCCTCTGATCGAGACAAACGGCGAAACCGGGGAGATCGTGTGG | |
| | GATAAGGGCCGGGATTTTGCCACCGTGCGGAAAGTGCTGAGCATGCCCCAAG | |
| | TGAATATCGTGAAAAAGACCGAGGTGCAGACAGGCGGCTTCAGCAAAGAGTC | |
| | TATCCTGCCCAAGAGGAACAGCGATAAGCTGATCGCCAGAAAGAAGGACTGG | |
| | GACCCTAAGAAGTACGGCGGCTTCGACAGCCCCACCGTGGCCTATTCTGTGC | |
| | TGGTGGTGGCCAAAGTGGAAAAGGGCAAGTCCAAGAAACTGAAGAGTGTGAA | |
| | AGAGCTGCTGGGGATCACCATCATGGAAAGAAGCAGCTTCGAGAAGAATCCC | |
| | ATCGACTTTCTGGAAGCCAAGGGCTACAAAGAAGTGAAAAAGGACCTGATCA | |
| | TCAAGCTGCCTAAGTACTCCCTGTTCGAGCTGGAAAACGGCCGGAAGAGAAT | |
| | GCTGGCCTCTGCCGGCGAACTGCAGAAGGGAAACGAACTGGCCCTGCCCTCC | |
| | AAATATGTGAACTTCCTGTACCTGGCCAGCCACTATGAGAAGCTGAAGGGCT | |
| | CCCCCGAGGATAATGAGCAGAAACAGCTGTTTGTGGAACAGCACAAGCACTA | |
| | CCTGGACGAGATCATCGAGCAGATCAGCGAGTTCTCCAAGAGAGTGATCCTG | |
| | GCCGACGCTAATCTGGACAAAGTGCTGTCCGCCTACAACAAGCACCGGGATA | |
| | AGCCCATCAGAGAGCAGGCCGAGAATATCATCCACCTGTTTACCCTGACCAA | |
| | TCTGGGAGCCCCTGCCGCCTTCAAGTACTTTGACACCACCATCGACCGGAAG | |
| | AGGTACACCAGCACCAAAGAGGTGCTGGACGCCACCCTGATCCACCAGAGCA | |
| | TCACCGGCCTGTACGAGACACGGATCGACCTGTCTCAGCTGGGAGGTGACTC | |
| | CGGCGGCAGCGAGGCCGCCGCCAAGGAAGCCGCCGCCAAGGAAGCCGCTGCC | |
| | AAGGAGGCCGCTGCTAAAAGCGGCGGATCTACCCTGAACATCGAGGACGAGT | |
| | ACAGGCTGCACGAGACCAGCAAGGAGCCCGACGTGAGCCTGGGCAGCACCTG | |
| | GCTGAGCGATTTCCCTCAGGCTTGGGCCGAGACCGGCGGCATGGGCCTGGCC | |
| | GTGCGGCAGGCCCCCCTGATTATCCCCCTGAAGGCCACCAGCACCCCCGTGA | |
| | GCATCAAGCAGTACCCAATGTCCCAGGAGGCCAGGCTGGGCATCAAGCCTCA | |
| | CATCCAGAGGCTGCTGGACCAGGGCATCCTGGTGCCATGCCAGTCCCCCTGG | |
| | AACACCCCTCTGCTGCCCGTGAAGAAGCCTGGCACCAACGACTACCGGCCCG | |
| | TGCAGGACCTGAGAGAAGTGAACAAGCGGGTGGAGGACATCCACCCAACCGT | |
| | GCCCAACCCTTACAACCTGCTGTCCGGCCTGCCCCCCAGCCACCAGTGGTAC | |
| | ACCGTGCTGGACCTGAAGGACGCCTTCTTCTGCCTGAGACTGCACCCCACCT | |
| | CTCAGCCCCTGTTCGCCTTCGAGTGGCGCGACCCCGAGATGGGCATCAGCGG | |
| | CCAGCTGACCTGGACCAGACTGCCACAGGGCTTTAAGAATAGCCCAACCCTG | |
| | TTTAACGAGGCCCTGCACAGGGACCTGGCCGACTTCAGGATCCAGCACCCCG | |
| | ACCTGATTCTGCTGCAGTACGTGGACGACCTGCTGCTGGCCGCTACCAGCGA | |
| | GCTGGACTGCCAGCAGGGCACCAGAGCCCTGCTGCAGACCCTGGGCAACCTG | |
| | GGCTACAGAGCCAGCGCCAAGAAGGCCCAGATCTGTCAGAAGCAGGTGAAGT | |
| | ATCTGGGCTACCTGCTGAAGGAAGGCCAGAGATGGCTGACCGAGGCCAGAAA | |
| | GGAGACTGTGATGGGCCAGCCCACCCCCAAGACCCCCAGGCAGCTGCGGGAG | |
| | TTCCTGGGCAAGGCCGGCTTTTGCAGACTGTTTATCCCTGGCTTCGCCGAGA | |
| | TGGCCGCCCCACTGTACCCTCTGACCAAGCCTGGCACCCTGTTTAACTGGGG | |
| | CCCCGACCAGCAGAAGGCCTACCAGGAGATCAAGCAGGCCCTGCTGACCGCC | |
| | CCCGCCCTGGGCCTGCCCGACCTGACCAAGCCTTTCGAGCTGTTCGTGGACG | |
| | AGAAGCAGGGATACGCCAAAGGCGTGCTGACCCAGAAGCTGGGCCCCTGGCG | |
| | GAGGCCCGTGGCCTACCTGAGCAAAAAACTGGACCCTGTGGCCGCCGGCTGG | |
| | CCCCCATGCCTGCGGATGGTGGCCGCCATCGCTGTGCTGACCAAGGACGCCG | |
| | GCAAGCTGACCATGGGCCAGCCCCTGGTGATCCTGGCCCCTCACGCCGTGGA | |
| | GGCTCTGGTGAAGCAGCCTCCAGACAGGTGGCTGTCCAACGCCAGGATGACC | |
| | CACTACCAGGCCCTGCTGCTGGACACCGACCGGGTGCAGTTCGGCCCTGTGG | |
| | TGGCCCTGAACCCCGCCACCCTGCTGCCTCTGCCAGAGGAGGGCCTGCAGCA | |
| | CAACTGCCTGGACATCCTGGCCGAGGCCCACGGGGGGGGCTCCAAACGCACC | |
| | GCCGACGGGAGCGAGTTCGAGCCCAAGAAGAAGAGGAAAGTCTAA | |

### OTHER EMBODIMENTS

[0607] From the foregoing description, it will be apparent that variations and modifications may be made to the disclosure described herein to adopt it to various usages and conditions. Such embodiments are also within the scope of the following claims.

[0608] The recitation of a listing of elements in any definition of a variable herein includes definitions of that variable as any single element or combination (or subcombination) of listed elements. The recitation of an embodiment herein includes that embodiment as any single embodiment or in combination with any other embodiments or portions thereof.

[0609] The disclosure may be related to one or more of International Patent Applications No. PCT/US22/75021, PCT/US20/13964, PCT/US20/52822, PCT/US20/18178, PCT/US21/52035, PCT/US22/81241, PCT/US23/67780, PCT/US23/68543, PCT/US23/72911, and/or PCT/US24/18668 and/or U.S. Provisional Patent Applications Nos. 63/592,339, 63/612,146, 63/618,520, and/or 63/621,953, the disclosures of which are incorporated herein by reference in their entirety for all purposes. All patents and publications mentioned in this specification are herein incorporated by reference to the same extent as if each independent patent and publication was specifically and individually indicated to be incorporated by reference.

The application's sequence listing, which the Patent Office published only in electronic form, follows.

SEQUENCE LISTING (1118 sequences)

SEQ ID NO: 1 - protein, 167 aa, Escherichia coli
  REGION 1..167: note = misc_feature - TadA*7.10 (ecTadA) polypeptide sequence
MSEVEFSHEYWMRHALTLAKRARDEREVPVGAVLVLNNRVIGEGWNRAIGLHDPTAHAEIMALRQGGLVMQNYRLIDATLYVTFEPCVMCAGAMIHSRIGRVVFGVRNAKTGAAGSLMDVLHYPGMNHRVEITEGILADECAALLCYFFRMPRQVFNAQKKAQSSTD

SEQ ID NO: 2 - DNA, 4092 bp, synthetic construct
  misc_feature 1..4092: note = BhCas12b GGSGGS-ABE8-Xten20at P153 polynucleotide sequence
  misc_feature 1..6: note = Kozak sequence
  misc_feature 7..57: note = Sequence encoding N-terminal nuclear localization signal
  misc_feature 58..513: note = Sequence encoding BhCas12b
  misc_feature 514..531: note = Sequence encoding a linker
  misc_feature 532..1029: note = Sequence encoding TadA*8
  misc_feature 1030..1089: note = Sequence encoding Xten20 linker
  misc_feature 1090..3954: note = Sequence encoding BhCas12b
  misc_feature 3955..4002: note = Sequence encoding C-terminal NLS
  misc_feature 4003..4008: note = Sequence encoding GS linker
  misc_feature 4009..4089: note = Sequence encoding 3x hemagglutinin (HA) tag
  source 1..4092: mol_type = other DNA
gccaccatggccccaaagaagaagcggaaggtcggtatccacggagtcccagcagccgccaccagatccttcatcctgaagatcgagcccaacgaggaagtgaagaaaggcctctggaaaacccacgaggtgctgaaccacggaatcgcctactacatgaatatcctgaagctgatccggcaagaggccatctacgagcaccacgagcaggaccccaagaatcccaagaaggtgtccaaggccgagatccaggccgagctgtgggatttcgtgctgaagatgcagaagtgcaacagcttcacacacgaggtggacaaggacgaggtgttcaacatcctgagagagctgtacgaggaactggtgcccagcagcgtggaaaagaagggcgaagccaaccagctgagcaacaagtttctgtaccctctggtggaccccaacagccagtctggaaagggaacagccagcagcggcagaaagcccagatggtacaacctgaagattgccggcgatcccggaggctctggaggaagctccgaagtcgagttttcccatgagtactggatgagacacgcattgactctcgcaaagagggctcgagatgaacgcgaggtgcccgtgggggcagtactcgtgctcaacaatcgcgtaatcggcgaaggttggaatagggcaatcggactccacgaccccactgcacatgcggaaatcatggcccttcgacagggagggcttgtgatgcagaattatcgactttatgatgcgacgctgtacgtcacgtttgaaccttgcgtaatgtgcgcgggagctatgattcactcccgcattggacgagttgtattcggtgttcgcaacgccaagacgggtgccgcaggttcactgatggacgtgctgcatcatccaggcatgaaccaccgggtagaaatcacagaaggcatattggcggacgaatgtgcggcgctgttgtgtcgtttttttcgcatgcccaggcgggtctttaacgcccagaaaaaagcacaatcctctactgacggctcttctggatctgaaacacctggcacaagcgagagcgccacccctgagagctctggctcctgggaagaagagaagaagaagtgggaagaagataagaaaaaggacccgctggccaagatcctgggcaagctggctgagtacggactgatccctctgttcatcccctacaccgacagcaacgagcccatcgtgaaagaaatcaagtggatggaaaagtcccggaaccagagcgtgcggcggctggataaggacatgttcattcaggccctggaacggttcctgagctgggagagctggaacctgaaagtgaaagaggaatacgagaaggtcgagaaagagtacaagaccctggaagagaggatcaaagaggacatccaggctctgaaggctctggaacagtatgagaaagagcggcaagaacagctgctgcgggacaccctgaacaccaacgagtaccggctgagcaagagaggccttagaggctggcgggaaatcatccagaaatggctgaaaatggacgagaacgagccctccgagaagtacctggaagtgttcaaggactaccagcggaagcaccctagagaggccggcgattacagcgtgtacgagttcctgtccaagaaagagaaccacttcatctggcggaatcaccctgagtacccctacctgtacgccaccttctgcgagatcgacaagaaaaagaaggacgccaagcagcaggccaccttcacactggccgatcctatcaatcaccctctgtgggtccgattcgaggaaagaagcggcagcaacctgaacaagtacagaatcctgaccgagcagctgcacaccgagaagctgaagaaaaagctgacagtgcagctggaccggctgatctaccctacagaatctggcggctgggaagagaagggcaaagtggacattgtgctgctgcccagccggcagttctacaaccagatcttcctggacatcgaggaaaagggcaagcacgccttcacctacaaggatgagagcatcaagttccctctgaagggcacactcggcggagccagagtgcagttcgacagagatcacctgagaagataccctcacaaggtggaaagcggcaacgtgggcagaatctacttcaacatgaccgtgaacatcgagcctacagagtccccagtgtccaagtctctgaagatccaccgggacgacttccccaaggtggtcaacttcaagcccaaagaactgaccgagtggatcaaggacagcaagggcaagaaactgaagtccggcatcgagtccctggaaatcggcctgagagtgatgagcatcgacctgggacagagacaggccgctgccgcctctattttcgaggtggtggatcagaagcccgacatcgaaggcaagctgtttttcccaatcaagggcaccgagctgtatgccgtgcacagagccagcttcaacatcaagctgcccggcgagacactggtcaagagcagagaagtgctgcggaaggccagagaggacaatctgaaactgatgaaccagaagctcaacttcctgcggaacgtgctgcacttccagcagttcgaggacatcaccgagagagagaagcgggtcaccaagtggatcagcagacaagagaacagcgacgtgcccctggtgtaccaggatgagctgatccagatccgcgagctgatgtacaagccttacaaggactgggtcgccttcctgaagcagctccacaagagactggaagtcgagatcggcaaagaagtgaagcactggcggaagtccctgagcgacggaagaaagggcctgtacggcatctccctgaagaacatcgacgagatcgatcggacccggaagttcctgctgagatggtccctgaggcctaccgaacctggcgaagtgcgtagactggaacccggccagagattcgccatcgaccagctgaatcacctgaacgccctgaaagaagatcggctgaagaagatggccaacaccatcatcatgcacgccctgggctactgctacgacgtgcggaagaagaaatggcaggctaagaaccccgcctgccagatcatcctgttcgaggatctgagcaactacaacccctacgaggaaaggtcccgcttcgagaacagcaagctcatgaagtggtccagacgcgagatccccagacaggttgcactgcagggcgagatctatggcctgcaagtgggagaagtgggcgctcagttcagcagcagattccacgccaagacaggcagccctggcatcagatgtagcgtcgtgaccaaagagaagctgcaggacaatcggttcttcaagaatctgcagagagagggcagactgaccctggacaaaatcgccgtgctgaaagagggcgatctgtacccagacaaaggcggcgagaagttcatcagcctgagcaaggatcggaagtgcgtgaccacacacgccgacatcaacgccgctcagaacctgcagaagcggttctggacaagaacccacggcttctacaaggtgtactgcaaggcctaccaggtggacggccagaccgtgtacatccctgagagcaaggaccagaagcagaagatcatcgaagagttcggcgagggctacttcattctgaaggacggggtgtacgaatgggtcaacgccggcaagctgaaaatcaagaagggcagctccaagcagagcagcagcgagctggtggatagcgacatcctgaaagacagcttcgacctggcctccgagctgaaaggcgaaaagctgatgctgtacagggaccccagcggcaatgtgttccccagcgacaaatggatggccgctggcgtgttcttcggaaagctggaacgcatcctgatcagcaagctgaccaaccagtactccatcagcaccatcgaggacgacagcagcaagcagtctatgaaaaggccggcggccacgaaaaaggccggccaggcaaaaaagaaaaagggatcctacccatacgatgttccagattacgcttatccctacgacgtgcctgattatgcatacccatatgatgtccccgactatgcctaa

SEQ ID NO: 3 - protein, 1361 aa, synthetic construct
  REGION 1..1361: note = BhCas12b GGSGGS-ABE8-Xten20at P153 polypeptide sequence
MAPKKKRKVGIHGVPAAATRSFILKIEPNEEVKKGLWKTHEVLNHGIAYYMNILKLIRQEAIYEHHEQDPKNPKKVSKAEIQAELWDFVLKMQKCNSFTHEVDKDEVFNILRELYEELVPSSVEKKGEANQLSNKFLYPLVDPNSQSGKGTASSGRKPRWYNLKIAGDPGGSGGSSEVEFSHEYWMRHALTLAKRARDEREVPVGAVLVLNNRVIGEGWNRAIGLHDPTAHAEIMALRQGGLVMQNYRLYDATLYVTFEPCVMCAGAMIHSRIGRVVFGVRNAKTGAAGSLMDVLHHPGMNHRVEITEGILADECAALLCRFFRMPRRVFNAQKKAQSSTDGSSGSETPGTSESATPESSGSWEEEKKKWEEDKKKDPLAKILGKLAEYGLIPLFIPYTDSNEPIVKEIKWMEKSRNQSVRRLDKDMFIQALERFLSWESWNLKVKEEYEKVEKEYKTLEERIKEDIQALKALEQYEKERQEQLLRDTLNTNEYRLSKRGLRGWREIIQKWLKMDENEPSEKYLEVFKDYQRKHPREAGDYSVYEFLSKKENHFIWRNHPEYPYLYATFCEIDKKKKDAKQQATFTLADPINHPLWVRFEERSGSNLNKYRILTEQLHTEKLKKKLTVQLDRLIYPTESGGWEEKGKVDIVLLPSRQFYNQIFLDIEEKGKHAFTYKDESIKFPLKGTLGGARVQFDRDHLRRYPHKVESGNVGRIYFNMTVNIEPTESPVSKSLKIHRDDFPKVVNFKPKELTEWIKDSKGKKLKSGIESLEIGLRVMSIDLGQRQAAAASIFEVVDQKPDIEGKLFFPIKGTELYAVHRASFNIKLPGETLVKSREVLRKAREDNLKLMNQKLNFLRNVLHFQQFEDITEREKRVTKWISRQENSDVPLVYQDELIQIRELMYKPYKDWVAFLKQLHKRLEVEIGKEVKHWRKSLSDGRKGLYGISLKNIDEIDRTRKFLLRWSLRPTEPGEVRRLEPGQRFAIDQLNHLNALKEDRLKKMANTIIMHALGYCYDVRKKKWQAKNPACQIILFEDLSNYNPYEERSRFENSKLMKWSRREIPRQVALQGEIYGLQVGEVGAQFSSRFHAKTGSPGIRCSVVTKEKLQDNRFFKNLQREGRLTLDKIAVLKEGDLYPDKGGEKFISLSKDRKCVTTHADINAAQNLQKRFWTRTHGFYKVYCKAYQVDGQTVYIPESKDQKQKIIEEFGEGYFILKDGVYEWVNAGKLKIKKGSSKQSSSELVDSDILKDSFDLASELKGEKLMLYRDPSGNVFPSDKWMAAGVFFGKLERILISKLTNQYSISTIEDDSSKQSMKRPAATKKAGQAKKKKGSYPYDVPDYAYPYDVPDYAYPYDVPDYA

SEQ ID NO: 4 - DNA, 4092 bp, synthetic construct
  misc_feature 1..4092: note = BhCas12b GGSGGS-ABE8-Xten20at K255 polynucleotide sequence
  misc_feature 1..6: note = Kozak sequence
  misc_feature 7..57: note = Sequence encoding N-terminal nuclear localization signal (NLS)
  misc_feature 58..822: note = Sequence encoding BhCas12b
  misc_feature 823..840: note = Sequence encoding a linker
  misc_feature 841..1338: note = Sequence encoding TadA*8
  misc_feature 1339..1398: note = Sequence encoding Xten20 linker
  misc_feature 1399..3954: note = Sequence encoding BhCas12b
  misc_feature 3955..4002: note = Sequence encoding C-terminal NLS
  misc_feature 4003..4008: note = Sequence encoding a GS linker
  misc_feature 4009..4089: note = Sequence encoding 3x hemagglutinin (HA) tag
  source 1..4092: mol_type = other DNA
gccaccatggccccaaagaagaagcggaaggtcggtatccacggagtcccagcagccgccaccagatccttcatcctgaagatcgagcccaacgaggaagtgaagaaaggcctctggaaaacccacgaggtgctgaaccacggaatcgcctactacatgaatatcctgaagctgatccggcaagaggccatctacgagcaccacgagcaggaccccaagaatcccaagaaggtgtccaaggccgagatccaggccgagctgtgggatttcgtgctgaagatgcagaagtgcaacagcttcacacacgaggtggacaaggacgaggtgttcaacatcctgagagagctgtacgaggaactggtgcccagcagcgtggaaaagaagggcgaagccaaccagctgagcaacaagtttctgtaccctctggtggaccccaacagccagtctggaaagggaacagccagcagcggcagaaagcccagatggtacaacctgaagattgccggcgatccctcctgggaagaagagaagaagaagtgggaagaagataagaaaaaggacccgctggccaagatcctgggcaagctggctgagtacggactgatccctctgttcatcccctacaccgacagcaacgagcccatcgtgaaagaaatcaagtggatggaaaagtcccggaaccagagcgtgcggcggctggataaggacatgttcattcaggccctggaacggttcctgagctgggagagctggaacctgaaagtgaaagaggaatacgagaaggtcgagaaagagtacaagaccctggaagagaggatcaaaggaggctctggaggaagctccgaagtcgagttttcccatgagtactggatgagacacgcattgactctcgcaaagagggctcgagatgaacgcgaggtgcccgtgggggcagtactcgtgctcaacaatcgcgtaatcggcgaaggttggaatagggcaatcggactccacgaccccactgcacatgcggaaatcatggcccttcgacagggagggcttgtgatgcagaattatcgactttatgatgcgacgctgtacgtcacgtttgaaccttgcgtaatgtgcgcgggagctatgattcactcccgcattggacgagttgtattcggtgttcgcaacgccaagacgggtgccgcaggttcactgatggacgtgctgcatcatccaggcatgaaccaccgggtagaaatcacagaaggcatattggcggacgaatgtgcggcgctgttgtgtcgtttttttcgcatgcccaggcgggtctttaacgcccagaaaaaagcacaatcctctactgacggctcttctggatctgaaacacctggcacaagcgagagcgccacccctgagagctctggcgaggacatccaggctctgaaggctctggaacagtatgagaaagagcggcaagaacagctgctgcgggacaccctgaacaccaacgagtaccggctgagcaagagaggccttagaggctggcgggaaatcatccagaaatggctgaaaatggacgagaacgagccctccgagaagtacctggaagtgttcaaggactaccagcggaagcaccctagagaggccggcgattacagcgtgtacgagttcctgtccaagaaagagaaccacttcatctggcggaatcaccctgagtacccctacctgtacgccaccttctgcgagatcgacaagaaaaagaaggacgccaagcagcaggccaccttcacactggccgatcctatcaatcaccctctgtgggtccgattcgaggaaagaagcggcagcaacctgaacaagtacagaatcctgaccgagcagctgcacaccgagaagctgaagaaaaagctgacagtgcagctggaccggctgatctaccctacagaatctggcggctgggaagagaagggcaaagtggacattgtgctgctgcccagccggcagttctacaaccagatcttcctggacatcgaggaaaagggcaagcacgccttcacctacaaggatgagagcatcaagttccctctgaagggcacactcggcggagccagagtgcagttcgacagagatcacctgagaagataccctcacaaggtggaaagcggcaacgtgggcagaatctacttcaacatgaccgtgaacatcgagcctacagagtccccagtgtccaagtctctgaagatccaccgggacgacttccccaaggtggtcaacttcaagcccaaagaactgaccgagtggatcaaggacagcaagggcaagaaactgaagtccggcatcgagtccctggaaatcggcctgagagtgatgagcatcgacctgggacagagacaggccgctgccgcctctattttcgaggtggtggatcagaagcccgacatcgaaggcaagctgtttttcccaatcaagggcaccgagctgtatgccgtgcacagagccagcttcaacatcaagctgcccggcgagacactggtcaagagcagagaagtgctgcggaaggccagagaggacaatctgaaactgatgaaccagaagctcaacttcctgcggaacgtgctgcacttccagcagttcgaggacatcaccgagagagagaagcgggtcaccaagtggatcagcagacaagagaacagcgacgtgcccctggtgtaccaggatgagctgatccagatccgcgagctgatgtacaagccttacaaggactgggtcgccttcctgaagcagctccacaagagactggaagtcgagatcggcaaagaagtgaagcactggcggaagtccctgagcgacggaagaaagggcctgtacggcatctccctgaagaacatcgacgagatcgatcggacccggaagttcctgctgagatggtccctgaggcctaccgaacctggcgaagtgcgtagactggaacccggccagagattcgccatcgaccagctgaatcacctgaacgccctgaaagaagatcggctgaagaagatggccaacaccatcatcatgcacgccctgggctactgctacgacgtgcggaagaagaaatggcaggctaagaaccccgcctgccagatcatcctgttcgaggatctgagcaactacaacccctacgaggaaaggtcccgcttcgagaacagcaagctcatgaagtggtccagacgcgagatccccagacaggttgcactgcagggcgagatctatggcctgcaagtgggagaagtgggcgctcagttcagcagcagattccacgccaagacaggcagccctggcatcagatgtagcgtcgtgaccaaagagaagctgcaggacaatcggttcttcaagaatctgcagagagagggcagactgaccctggacaaaatcgccgtgctgaaagagggcgatctgtacccagacaaaggcggcgagaagttcatcagcctgagcaaggatcggaagtgcgtgaccacacacgccgacatcaacgccgctcagaacctgcagaagcggttctggacaagaacccacggcttctacaaggtgtactgcaaggcctaccaggtggacggccagaccgtgtacatccctgagagcaaggaccagaagcagaagatcatcgaagagttcggcgagggctacttcattctgaaggacggggtgtacgaatgggtcaacgccggcaagctgaaaatcaagaagggcagctccaagcagagcagcagcgagctggtggatagcgacatcctgaaagacagcttcgacctggcctccgagctgaaaggcgaaaagctgatgctgtacagggaccccagcggcaatgtgttccccagcgacaaatggatggccgctggcgtgttcttcggaaagctggaacgcatcctgatcagcaagctgaccaaccagtactccatcagcaccatcgaggacgacagcagcaagcagtctatgaaaaggccggcggccacgaaaaaggccggccaggcaaaaaagaaaaagggatcctacccatacgatgttccagattacgcttatccctacgacgtgcctgattatgcatacccatatgatgtccccgactatgcctaa

SEQ ID NO: 5 - protein, 1361 aa, synthetic construct
  REGION 1..1361: note = BhCas12b GGSGGS-ABE8-Xten20at K255 polypeptide sequence
MAPKKKRKVGIHGVPAAATRSFILKIEPNEEVKKGLWKTHEVLNHGIAYYMNILKLIRQEAIYEHHEQDPKNPKKVSKAEIQAELWDFVLKMQKCNSFTHEVDKDEVFNILRELYEELVPSSVEKKGEANQLSNKFLYPLVDPNSQSGKGTASSGRKPRWYNLKIAGDPSWEEEKKKWEEDKKKDPLAKILGKLAEYGLIPLFIPYTDSNEPIVKEIKWMEKSRNQSVRRLDKDMFIQALERFLSWESWNLKVKEEYEKVEKEYKTLEERIKGGSGGSSEVEFSHEYWMRHALTLAKRARDEREVPVGAVLVLNNRVIGEGWNRAIGLHDPTAHAEIMALRQGGLVMQNYRLYDATLYVTFEPCVMCAGAMIHSRIGRVVFGVRNAKTGAAGSLMDVLHHPGMNHRVEITEGILADECAALLCRFFRMPRRVFNAQKKAQSSTDGSSGSETPGTSESATPESSGEDIQALKALEQYEKERQEQLLRDTLNTNEYRLSKRGLRGWREIIQKWLKMDENEPSEKYLEVFKDYQRKHPREAGDYSVYEFLSKKENHFIWRNHPEYPYLYATFCEIDKKKKDAKQQATFTLADPINHPLWVRFEERSGSNLNKYRILTEQLHTEKLKKKLTVQLDRLIYPTESGGWEEKGKVDIVLLPSRQFYNQIFLDIEEKGKHAFTYKDESIKFPLKGTLGGARVQFDRDHLRRYPHKVESGNVGRIYFNMTVNIEPTESPVSKSLKIHRDDFPKVVNFKPKELTEWIKDSKGKKLKSGIESLEIGLRVMSIDLGQRQAAAASIFEVVDQKPDIEGKLFFPIKGTELYAVHRASFNIKLPGETLVKSREVLRKAREDNLKLMNQKLNFLRNVLHFQQFEDITEREKRVTKWISRQENSDVPLVYQDELIQIRELMYKPYKDWVAFLKQLHKRLEVEIGKEVKHWRKSLSDGRKGLYGISLKNIDEIDRTRKFLLRWSLRPTEPGEVRRLEPGQRFAIDQLNHLNALKEDRLKKMANTIIMHALGYCYDVRKKKWQAKNPACQIILFEDLSNYNPYEERSRFENSKLMKWSRREIPRQVALQGEIYGLQVGEVGAQFSSRFHAKTGSPGIRCSVVTKEKLQDNRFFKNLQREGRLTLDKIAVLKEGDLYPDKGGEKFISLSKDRKCVTTHADINAAQNLQKRFWTRTHGFYKVYCKAYQVDGQTVYIPESKDQKQKIIEEFGEGYFILKDGVYEWVNAGKLKIKKGSSKQSSSELVDSDILKDSFDLASELKGEKLMLYRDPSGNVFPSDKWMAAGVFFGKLERILISKLTNQYSISTIEDDSSKQSMKRPAATKKAGQAKKKKGSYPYDVPDYAYPYDVPDYAYPYDVPDYA

SEQ ID NO: 6 - DNA, 4092 bp, synthetic construct
  misc_feature 1..4092: note = BhCas12b GGSGGS-ABE8-Xten20at D306 polynucleotide sequence
  misc_feature 1..6: note = Kozak sequence
  misc_feature 7..57: note = Sequence encoding N-terminal nuclear localization signal (NLS)
  misc_feature 58..975: note = Sequence encoding BhCas12b
  misc_feature 976..993: note = Sequence encoding a linker
  misc_feature 994..1491: note = Sequence encoding TadA*8
  misc_feature 1492..1551: note = Sequence encoding Xten20 linker
  misc_feature 1552..3954: note = Sequence encoding BhCas12b
  misc_feature 3955..4002: note = Sequence encoding C-terminal NLS
  misc_feature 4003..4008: note = Sequence encoding a GS linker
  misc_feature 4009..4089: note = Sequence encoding 3x hemagglutinin (HA) tag
  source 1..4092: mol_type = other DNA
gccaccatggccccaaagaagaagcggaaggtcggtatccacggagtcccagcagccgccaccagatccttcatcctgaagatcgagcccaacgaggaagtgaagaaaggcctctggaaaacccacgaggtgctgaaccacggaatcgcctactacatgaatatcctgaagctgatccggcaagaggccatctacgagcaccacgagcaggaccccaagaatcccaagaaggtgtccaaggccgagatccaggccgagctgtgggatttcgtgctgaagatgcagaagtgcaacagcttcacacacgaggtggacaaggacgaggtgttcaacatcctgagagagctgtacgaggaactggtgcccagcagcgtggaaaagaagggcgaagccaaccagctgagcaacaagtttctgtaccctctggtggaccccaacagccagtctggaaagggaacagccagcagcggcagaaagcccagatggtacaacctgaagattgccggcgatccctcctgggaagaagagaagaagaagtgggaagaagataagaaaaaggacccgctggccaagatcctgggcaagctggctgagtacggactgatccctctgttcatcccctacaccgacagcaacgagcccatcgtgaaagaaatcaagtggatggaaaagtcccggaaccagagcgtgcggcggctggataaggacatgttcattcaggccctggaacggttcctgagctgggagagctggaacctgaaagtgaaagaggaatacgagaaggtcgagaaagagtacaagaccctggaagagaggatcaaagaggacatccaggctctgaaggctctggaacagtatgagaaagagcggcaagaacagctgctgcgggacaccctgaacaccaacgagtaccggctgagcaagagaggccttagaggctggcgggaaatcatccagaaatggctgaaaatggacggaggctctggaggaagctccgaagtcgagttttcccatgagtactggatgagacacgcattgactctcgcaaagagggctcgagatgaacgcgaggtgcccgtgggggcagtactcgtgctcaacaatcgcgtaatcggcgaaggttggaatagggcaatcggactccacgaccccactgcacatgcggaaatcatggcccttcgacagggagggcttgtgatgcagaattatcgactttatgatgcgacgctgtacgtcacgtttgaaccttgcgtaatgtgcgcgggagctatgattcactcccgcattggacgagttgtattcggtgttcgcaacgccaagacgggtgccgcaggttcactgatggacgtgctgcatcatccaggcatgaaccaccgggtagaaatcacagaaggcatattggcggacgaatgtgcggcgctgttgtgtcgtttttttcgcatgcccaggcgggtctttaacgcccagaaaaaagcacaatcctctactgacggctcttctggatctgaaacacctggcacaagcgagagcgccacccctgagagctctggcgagaacgagccctccgagaagtacctggaagtgttcaaggactaccagcggaagcaccctagagaggccggcgattacagcgtgtacgagttcctgtccaagaaagagaaccacttcatctggcggaatcaccctgagtacccctacctgtacgccaccttctgcgagatcgacaagaaaaagaaggacgccaagcagcaggccaccttcacactggccgatcctatcaatcaccctctgtgggtccgattcgaggaaagaagcggcagcaacctgaacaagtacagaatcctgaccgagcagctgcacaccgagaagctgaagaaaaagctgacagtgcagctggaccggctgatctaccctacagaatctggcggctgggaagagaagggcaaagtggacattgtgctgctgcccagccggcagttctacaaccagatcttcctggacatcgaggaaaagggcaagcacgccttcacctacaaggatgagagcatcaagttccctctgaagggcacactcggcggagccagagtgcagttcgacagagatcacctgagaagataccctcacaaggtggaaagcggcaacgtgggcagaatctacttcaacatgaccgtgaacatcgagcctacagagtccccagtgtccaagtctctgaagatccaccgggacgacttccccaaggtggtcaacttcaagcccaaagaactgaccgagtggatcaaggacagcaagggcaagaaactgaagtccggcatcgagtccctggaaatcggcctgagagtgatgagcatcgacctgggacagagacaggccgctgccgcctctattttcgaggtggtggatcagaagcccgacatcgaaggcaagctgtttttcccaatcaagggcaccgagctgtatgccgtgcacagagccagcttcaacatcaagctgcccggcgagacactggtcaagagcagagaagtgctgcggaaggccagagaggacaatctgaaactgatgaaccagaagctcaacttcctgcggaacgtgctgcacttccagcagttcgaggacatcaccgagagagagaagcgggtcaccaagtggatcagcagacaagagaacagcgacgtgcccctggtgtaccaggatgagctgatccagatccgcgagctgatgtacaagccttacaaggactgggtcgccttcctgaagcagctccacaagagactggaagtcgagatcggcaaagaagtgaagcactggcggaagtccctgagcgacggaagaaagggcctgtacggcatctccctgaagaacatcgacgagatcgatcggacccggaagttcctgctgagatggtccctgaggcctaccgaacctggcgaagtgcgtagactggaacccggccagagattcgccatcgaccagctgaatcacctgaacgccctgaaagaagatcggctgaagaagatggccaacaccatcatcatgcacgccctgggctactgctacgacgtgcggaagaagaaatggcaggctaagaaccccgcctgccagatcatcctgttcgaggatctgagcaactacaacccctacgaggaaaggtcccgcttcgagaacagcaagctcatgaagtggtccagacgcgagatccccagacaggttgcactgcagggcgagatctatggcctgcaagtgggagaagtgggcgctcagttcagcagcagattccacgccaagacaggcagccctggcatcagatgtagcgtcgtgaccaaagagaagctgcaggacaatcggttcttcaagaatctgcagagagagggcagactgaccctggacaaaatcgccgtgctgaaagagggcgatctgtacccagacaaaggcggcgagaagttcatcagcctgagcaaggatcggaagtgcgtgaccacacacgccgacatcaacgccgctcagaacctgcagaagcggttctggacaagaacccacggcttctacaaggtgtactgcaaggcctaccaggtggacggccagaccgtgtacatccctgagagcaaggaccagaagcagaagatcatcgaagagttcggcgagggctacttcattctgaaggacggggtgtacgaatgggtcaacgccggcaagctgaaaatcaagaagggcagctccaagcagagcagcagcgagctggtggatagcgacatcctgaaagacagcttcgacctggcctccgagctgaaaggcgaaaagctgatgctgtacagggaccccagcggcaatgtgttccccagcgacaaatggatggccgctggcgtgttcttcggaaagctggaacgcatcctgatcagcaagctgaccaaccagtactccatcagcaccatcgaggacgacagcagcaagcagtctatgaaaaggccggcggccacgaaaaaggccggccaggcaaaaaagaaaaagggatcctacccatacgatgttccagattacgcttatccctacgacgtgcctgattatgcatacccatatgatgtccccgactatgcctaa

SEQ ID NO: 7 - protein, 1361 aa, synthetic construct
  REGION 1..1361: note = BhCas12b GGSGGS-ABE8-Xten20at D306 polypeptide sequence
MAPKKKRKVGIHGVPAAATRSFILKIEPNEEVKKGLWKTHEVLNHGIAYYMNILKLIRQEAIYEHHEQDPKNPKKVSKAEIQAELWDFVLKMQKCNSFTHEVDKDEVFNILRELYEELVPSSVEKKGEANQLSNKFLYPLVDPNSQSGKGTASSGRKPRWYNLKIAGDPSWEEEKKKWEEDKKKDPLAKILGKLAEYGLIPLFIPYTDSNEPIVKEIKWMEKSRNQSVRRLDKDMFIQALERFLSWESWNLKVKEEYEKVEKEYKTLEERIKEDIQALKALEQYEKERQEQLLRDTLNTNEYRLSKRGLRGWREIIQKWLKMDGGSGGSSEVEFSHEYWMRHALTLAKRARDEREVPVGAVLVLNNRVIGEGWNRAIGLHDPTAHAEIMALRQGGLVMQNYRLYDATLYVTFEPCVMCAGAMIHSRIGRVVFGVRNAKTGAAGSLMDVLHHPGMNHRVEITEGILADECAALLCRFFRMPRRVFNAQKKAQSSTDGSSGSETPGTSESATPESSGENEPSEKYLEVFKDYQRKHPREAGDYSVYEFLSKKENHFIWRNHPEYPYLYATFCEIDKKKKDAKQQATFTLADPINHPLWVRFEERSGSNLNKYRILTEQLHTEKLKKKLTVQLDRLIYPTESGGWEEKGKVDIVLLPSRQFYNQIFLDIEEKGKHAFTYKDESIKFPLKGTLGGARVQFDRDHLRRYPHKVESGNVGRIYFNMTVNIEPTESPVSKSLKIHRDDFPKVVNFKPKELTEWIKDSKGKKLKSGIESLEIGLRVMSIDLGQRQAAAASIFEVVDQKPDIEGKLFFPIKGTELYAVHRASFNIKLPGETLVKSREVLRKAREDNLKLMNQKLNFLRNVLHFQQFEDITEREKRVTKWISRQENSDVPLVYQDELIQIRELMYKPYKDWVAFLKQLHKRLEVEIGKEVKHWRKSLSDGRKGLYGISLKNIDEIDRTRKFLLRWSLRPTEPGEVRRLEPGQRFAIDQLNHLNALKEDRLKKMANTIIMHALGYCYDVRKKKWQAKNPACQIILFEDLSNYNPYEERSRFENSKLMKWSRREIPRQVALQGEIYGLQVGEVGAQFSSRFHAKTGSPGIRCSVVTKEKLQDNRFFKNLQREGRLTLDKIAVLKEGDLYPDKGGEKFISLSKDRKCVTTHADINAAQNLQKRFWTRTHGFYKVYCKAYQVDGQTVYIPESKDQKQKIIEEFGEGYFILKDGVYEWVNAGKLKIKKGSSKQSSSELVDSDILKDSFDLASELKGEKLMLYRDPSGNVFPSDKWMAAGVFFGKLERILISKLTNQYSISTIEDDSSKQSMKRPAATKKAGQAKKKKGSYPYDVPDYAYPYDVPDYAYPYDVPDYA

SEQ ID NO: 8 - DNA, 4092 bp, synthetic construct
  misc_feature 1..4092: note = BhCas12b GGSGGS-ABE8-Xten20at D980 polynucleotide sequence
  misc_feature 1..6: note = Kozak sequence
  misc_feature 7..57: note = Sequence encoding N-terminal nuclear localization signal (NLS)
  misc_feature 58..2997: note = Sequence encoding BhCas12b
  misc_feature 2998..3015: note = Sequence encoding a linker
  misc_feature 3016..3513: note = Sequence encoding TadA*8
  misc_feature 3514..3573: note = Sequence encoding Xten20 linker
  misc_feature 3574..3954: note = Sequence encoding BhCas12b
  misc_feature 3955..4002: note = Sequence encoding C-terminal NLS
  misc_feature 4003..4008: note = Sequence encoding a GS linker
  misc_feature 4009..4089: note = Sequence encoding 3x hemagglutinin (HA) tag
  source 1..4092: mol_type = other DNA
gccaccatggccccaaagaagaagcggaaggtcggtatccacggagtcccagcagccgccaccagatccttcatcctgaagatcgagcccaacgaggaagtgaagaaaggcctctggaaaacccacgaggtgctgaaccacggaatcgcctactacatgaatatcctgaagctgatccggcaagaggccatctacgagcaccacgagcaggaccccaagaatcccaagaaggtgtccaaggccgagatccaggccgagctgtgggatttcgtgctgaagatgcagaagtgcaacagcttcacacacgaggtggacaaggacgaggtgttcaacatcctgagagagctgtacgaggaactggtgcccagcagcgtggaaaagaagggcgaagccaaccagctgagcaacaagtttctgtaccctctggtggaccccaacagccagtctggaaagggaacagccagcagcggcagaaagcccagatggtacaacctgaagattgccggcgatccctcctgggaagaagagaagaagaagtgggaagaagataagaaaaaggacccgctggccaagatcctgggcaagctggctgagtacggactgatccctctgttcatcccctacaccgacagcaacgagcccatcgtgaaagaaatcaagtggatggaaaagtcccggaaccagagcgtgcggcggctggataaggacatgttcattcaggccctggaacggttcctgagctgggagagctggaacctgaaagtgaaagaggaatacgagaaggtcgagaaagagtacaagaccctggaagagaggatcaaagaggacatccaggctctgaaggctctggaacagtatgagaaagagcggcaagaacagctgctgcgggacaccctgaacaccaacgagtaccggctgagcaagagaggccttagaggctggcgggaaatcatccagaaatggctgaaaatggacgagaacgagccctccgagaagtacctggaagtgttcaaggactaccagcggaagcaccctagagaggccggcgattacagcgtgtacgagttcctgtccaagaaagagaaccacttcatctggcggaatcaccctgagtacccctacctgtacgccaccttctgcgagatcgacaagaaaaagaaggacgccaagcagcaggccaccttcacactggccgatcctatcaatcaccctctgtgggtccgattcgaggaaagaagcggcagcaacctgaacaagtacagaatcctgaccgagcagctgcacaccgagaagctgaagaaaaagctgacagtgcagctggaccggctgatctaccctacagaatctggcggctgggaagagaagggcaaagtggacattgtgctgctgcccagccggcagttctacaaccagatcttcctggacatcgaggaaaagggcaagcacgccttcacctacaaggatgagagcatcaagttccctctgaagggcacactcggcggagccagagtgcagttcgacagagatcacctgagaagataccctcacaaggtggaaagcggcaacgtgggcagaatctacttcaacatgaccgtgaacatcgagcctacagagtccccagtgtccaagtctctgaagatccaccgggacgacttccccaaggtggtcaacttcaagcccaaagaactgaccgagtggatcaaggacagcaagggcaagaaactgaagtccggcatcgagtccctggaaatcggcctgagagtgatgagcatcgacctgggacagagacaggccgctgccgcctctattttcgaggtggtggatcagaagcccgacatcgaaggcaagctgtttttcccaatcaagggcaccgagctgtatgccgtgcacagagccagcttcaacatcaagctgcccggcgagacactggtcaagagcagagaagtgctgcggaaggccagagaggacaatctgaaactgatgaaccagaagctcaacttcctgcggaacgtgctgcacttccagcagttcgaggacatcaccgagagagagaagcgggtcaccaagtggatcagcagacaagagaacagcgacgtgcccctggtgtaccaggatgagctgatccagatccgcgagctgatgtacaagccttacaaggactgggtcgccttcctgaagcagctccacaagagactggaagtcgagatcggcaaagaagtgaagcactggcggaagtccctgagcgacggaagaaagggcctgtacggcatctccctgaagaacatcgacgagatcgatcggacccggaagttcctgctgagatggtccctgaggcctaccgaacctggcgaagtgcgtagactggaacccggccagagattcgccatcgaccagctgaatcacctgaacgccctgaaagaagatcggctgaagaagatggccaacaccatcatcatgcacgccctgggctactgctacgacgtgcggaagaagaaatggcaggctaagaaccccgcctgccagatcatcctgttcgaggatctgagcaactacaacccctacgaggaaaggtcccgcttcgagaacagcaagctcatgaagtggtccagacgcgagatccccagacaggttgcactgcagggcgagatctatggcctgcaagtgggagaagtgggcgctcagttcagcagcagattccacgccaagacaggcagccctggcatcagatgtagcgtcgtgaccaaagagaagctgcaggacaatcggttcttcaagaatctgcagagagagggcagactgaccctggacaaaatcgccgtgctgaaagagggcgatctgtacccagacaaaggcggcgagaagttcatcagcctgagcaaggatcggaagtgcgtgaccacacacgccgacatcaacgccgctcagaacctgcagaagcggttctggacaagaacccacggcttctacaaggtgtactgcaaggcctaccaggtggacggaggctctggaggaagctccgaagtcgagttttcccatgagtactggatgagacacgcattgactctcgcaaagagggctcgagatgaacgcgaggtgcccgtgggggcagtactcgtgctcaacaatcgcgtaatcggcgaaggttggaatagggcaatcggactccacgaccccactgcacatgcggaaatcatggcccttcgacagggagggcttgtgatgcagaattatcgactttatgatgcgacgctgtacgtcacgtttgaaccttgcgtaatgtgcgcgggagctatgattcactcccgcattggacgagttgtattcggtgttcgcaacgccaagacgggtgccgcaggttcactgatggacgtgctgcatcatccaggcatgaaccaccgggtagaaatcacagaaggcatattggcggacgaatgtgcggcgctgttgtgtcgtttttttcgcatgcccaggcgggtctttaacgcccagaaaaaagcacaatcctctactgacggctcttctggatctgaaacacctggcacaagcgagagcgccacccctgagagctctggcggccagaccgtgtacatccctgagagcaaggaccagaagcagaagatcatcgaagagttcggcgagggctacttcattctgaaggacggggtgtacgaatgggtcaacgccggcaagctgaaaatcaagaagggcagctccaagcagagcagcagcgagctggtggatagcgacatcctgaaagacagcttcgacctggcctccgagctgaaaggcgaaaagctgatgctgtacagggaccccagcggcaatgtgttccccagcgacaaatggatggccgctggcgtgttcttcggaaagctggaacgcatcctgatcagcaagctgaccaaccagtactccatcagcaccatcgaggacgacagcagcaagcagtctatgaaaaggccggcggccacgaaaaaggccggccaggcaaaaaagaaaaagggatcctacccatacgatgttccagattacgcttatccctacgacgtgcctgattatgcatacccatatgatgtccccgactatgcctaa

SEQ ID NO: 9 - protein, 1361 aa, synthetic construct
  REGION 1..1361: note = BhCas12b GGSGGS-ABE8-Xten20at D980 polypeptide sequence
MAPKKKRKVGIHGVPAAATRSFILKIEPNEEVKKGLWKTHEVLNHGIAYYMNILKLIRQEAIYEHHEQDPKNPKKVSKAEIQAELWDFVLKMQKCNSFTHEVDKDEVFNILRELYEELVPSSVEKKGEANQLSNKFLYPLVDPNSQSGKGTASSGRKPRWYNLKIAGDPSWEEEKKKWEEDKKKDPLAKILGKLAEYGLIPLFIPYTDSNEPIVKEIKWMEKSRNQSVRRLDKDMFIQALERFLSWESWNLKVKEEYEKVEKEYKTLEERIKEDIQALKALEQYEKERQEQLLRDTLNTNEYRLSKRGLRGWREIIQKWLKMDENEPSEKYLEVFKDYQRKHPREAGDYSVYEFLSKKENHFIWRNHPEYPYLYATFCEIDKKKKDAKQQATFTLADPINHPLWVRFEERSGSNLNKYRILTEQLHTEKLKKKLTVQLDRLIYPTESGGWEEKGKVDIVLLPSRQFYNQIFLDIEEKGKHAFTYKDESIKFPLKGTLGGARVQFDRDHLRRYPHKVESGNVGRIYFNMTVNIEPTESPVSKSLKIHRDDFPKVVNFKPKELTEWIKDSKGKKLKSGIESLEIGLRVMSIDLGQRQAAAASIFEVVDQKPDIEGKLFFPIKGTELYAVHRASFNIKLPGETLVKSREVLRKAREDNLKLMNQKLNFLRNVLHFQQFEDITEREKRVTKWISRQENSDVPLVYQDELIQIRELMYKPYKDWVAFLKQLHKRLEVEIGKEVKHWRKSLSDGRKGLYGISLKNIDEIDRTRKFLLRWSLRPTEPGEVRRLEPGQRFAIDQLNHLNALKEDRLKKMANTIIMHALGYCYDVRKKKWQAKNPACQIILFEDLSNYNPYEERSRFENSKLMKWSRREIPRQVALQGEIYGLQVGEVGAQFSSRFHAKTGSPGIRCSVVTKEKLQDNRFFKNLQREGRLTLDKIAVLKEGDLYPDKGGEKFISLSKDRKCVTTHADINAAQNLQKRFWTRTHGFYKVYCKAYQVDGGSGGSSEVEFSHEYWMRHALTLAKRARDEREVPVGAVLVLNNRVIGEGWNRAIGLHDPTAHAEIMALRQGGLVMQNYRLYDATLYVTFEPCVMCAGAMIHSRIGRVVFGVRNAKTGAAGSLMDVLHHPGMNHRVEITEGILADECAALLCRFFRMPRRVFNAQKKAQSSTDGSSGSETPGTSESATPESSGGQTVYIPESKDQKQKIIEEFGEGYFILKDGVYEWVNAGKLKIKKGSSKQSSSELVDSDILKDSFDLASELKGEKLMLYRDPSGNVFPSDKWMAAGVFFGKLERILISKLTNQYSISTIEDDSSKQSMKRPAATKKAGQAKKKKGSYPYDVPDYAYPYDVPDYAYPYDVPDYA

SEQ ID NO: 10 - DNA, 4092 bp, synthetic construct
  misc_feature 1..4092: note = BhCas12b GGSGGS-ABE8-Xten20at K1019 polynucleotide sequence
  misc_feature 1..6: note = Kozak sequence
  misc_feature 7..57: note = Sequence encoding N-terminal nuclear localization signal (NLS)
  misc_feature 58..3114: note = Sequence encoding BhCas12b
  misc_feature 3115..3132: note = Sequence encoding a linker
  misc_feature 3133..3630: note = Sequence encoding TadA*8
  misc_feature 3631..3690: note = Sequence encoding Xten20 linker
  misc_feature 3691..3954: note = Sequence encoding BhCas12b
  misc_feature 3955..4002: note = Sequence encoding C-terminal NLS
  misc_feature 4003..4008: note = Sequence encoding GS linker
  misc_feature 4009..4089: note = Sequence encoding 3x hemagglutinin (HA) tag
  source 1..4092: mol_type = other DNA
gccaccatggccccaaagaagaagcggaaggtcggtatccacggagtcccagcagccgccaccagatccttcatcctgaagatcgagcccaacgaggaagtgaagaaaggcctctggaaaacccacgaggtgctgaaccacggaatcgcctactacatgaatatcctgaagctgatccggcaagaggccatctacgagcaccacgagcaggaccccaagaatcccaagaaggtgtccaaggccgagatccaggccgagctgtgggatttcgtgctgaagatgcagaagtgcaacagcttcacacacgaggtggacaaggacgaggtgttcaacatcctgagagagctgtacgaggaactggtgcccagcagcgtggaaaagaagggcgaagccaaccagctgagcaacaagtttctgtaccctctggtggaccccaacagccagtctggaaagggaacagccagcagcggcagaaagcccagatggtacaacctgaagattgccggcgatccctcctgggaagaagagaagaagaagtgggaagaagataagaaaaaggacccgctggccaagatcctgggcaagctggctgagtacggactgatccctctgttcatcccctacaccgacagcaacgagcccatcgtgaaagaaatcaagtggatggaaaagtcccggaaccagagcgtgcggcggctggataaggacatgttcattcaggccctggaacggttcctgagctgggagagctggaacctgaaagtgaaagaggaatacgagaaggtcgagaaagagtacaagaccctggaagagaggatcaaagaggacatccaggctctgaaggctctggaacagtatgagaaagagcggcaagaacagctgctgcgggacaccctgaacaccaacgagtaccggctgagcaagagaggccttagaggctggcgggaaatcatccagaaatggctgaaaatggacgagaacgagccctccgagaagtacctggaagtgttcaaggactaccagcggaagcaccctagagaggccggcgattacagcgtgtacgagttcctgtccaagaaagagaaccacttcatctggcggaatcaccctgagtacccctacctgtacgccaccttctgcgagatcgacaagaaaaagaaggacgccaagcagcaggccaccttcacactggccgatcctatcaatcaccctctgtgggtccgattcgaggaaagaagcggcagcaacctgaacaagtacagaatcctgaccgagcagctgcacaccgagaagctgaagaaaaagctgacagtgcagctggaccggctgatctaccctacagaatctggcggctgggaagagaagggcaaagtggacattgtgctgctgcccagccggcagttctacaaccagatcttcctggacatcgaggaaaagggcaagcacgccttcacctacaaggatgagagcatcaagttccctctgaagggcacactcggcggagccagagtgcagttcgacagagatcacctgagaagataccctcacaaggtggaaagcggcaacgtgggcagaatctacttcaacatgaccgtgaacatcgagcctacagagtccccagtgtccaagtctctgaagatccaccgggacgacttccccaaggtggtcaacttcaagcccaaagaactgaccgagtggatcaaggacagcaagggcaagaaactgaagtccggcatcgagtccctggaaatcggcctgagagtgatgagcatcgacctgggacagagacaggccgctgccgcctctattttcgaggtggtggatcagaagcccgacatcgaaggcaagctgtttttcccaatcaagggcaccgagctgtatgccgtgcacagagccagcttcaacatcaagctgcccggcgagacactggtcaagagcagagaagtgctgcggaaggccagagaggacaatctgaaactgatgaaccagaagctcaacttcctgcggaacgtgctgcacttccagcagttcgaggacatcaccgagagagagaagcgggtcaccaagtggatcagcagacaagagaacagcgacgtgcccctggtgtaccaggatgagctgatccagatccgcgagctgatgtacaagccttacaaggactgggtcgccttcctgaagcagctccacaagagactggaagtcgagatcggcaaagaagtgaagcactggcggaagtccctgagcgacggaagaaagggcctgtacggcatctccctgaagaacatcgacgagatcgatcggacccggaagttcctgctgagatggtccctgaggcctaccgaacctggcgaagtgcgtagactggaacccggccagagattcgccatcgaccagctgaatcacctgaacgccctgaaagaagatcggctgaagaagatggccaacaccatcatcatgcacgccctgggctactgctacgacgtgcggaagaagaaatggcaggctaagaaccccgcctgccagatcatcctgttcgaggatctgagcaactacaacccctacgaggaaaggtcccgcttcgagaacagcaagctcatgaagtggtccagacgcgagatccccagacaggttgcactgcagggcgagatctatggcctgcaagtgggagaagtgggcgctcagttcagcagcagattccacgccaagacaggcagccctggcatcagatgtagcgtcgtgaccaaagagaagctgcaggacaatcggttcttcaagaatctgcagagagagggcagactgaccctggacaaaatcgccgtgctgaaagagggcgatctgtacccagacaaaggcggcgagaagttcatcagcctgagcaaggatcggaagtgcgtgaccacacacgccgacatcaacgccgctcagaacctgcagaagcggttctggacaagaacccacggcttctacaaggtgtactgcaaggcctaccaggtggacggccagaccgtgtacatccctgagagcaaggaccagaagcagaagatcatcgaagagttcggcgagggctacttcattctgaaggacggggtgtacgaatgggtcaacgccggcaagggaggctctggaggaagctccgaagtcgagttttcccatgagtactggatgagacacgcattgactctcgcaaagagggctcgagatgaacgcgaggtgcccgtgggggcagtactcgtgctcaacaatcgcgtaatcggcgaaggttggaatagggcaatcggactccacgaccccactgcacatgcggaaatcatggcccttcgacagggagggcttgtgatgcagaattatcgactttatgatgcgacgctgtacgtcacgtttgaaccttgcgtaatgtgcgcgggagctatgattcactcccgcattggacgagttgtattcggtgttcgcaacgccaagacgggtgccgcaggttcactgatggacgtgctgcatcatccaggcatgaaccaccgggtagaaatcacagaaggcatattggcggacgaatgtgcggcgctgttgtgtcgtttttttcgcatgcccaggcgggtctttaacgcccagaaaaaagcacaatcctctactgacggctcttctggatctgaaacacctggcacaagcgagagcgccacccctgagagctctggcctgaaaatcaagaagggcagctccaagcagagcagcagcgagctggtggatagcgacatcctgaaagacagcttcgacctggcctccgagctgaaaggcgaaaagctgatgctgtacagggaccccagcggcaatgtgttccccagcgacaaatggatggccgctggcgtgttcttcggaaagctggaacgcatcctgatcagcaagctgaccaaccagtactccatcagcaccatcgaggacgacagcagcaagcagtctatgaaaaggccggcggccacgaaaaaggccggccaggcaaaaaagaaaaagggatcctacccatacgatgttccagattacgcttatccctacgacgtgcctgattatgcatacccatatgatgtccccgactatgcctaa

SEQ ID NO: 11 - protein, 1361 aa, synthetic construct
  REGION 1..1361: note = BhCas12b GGSGGS-ABE8-Xten20at K1019 polypeptide sequence
MAPKKKRKVGIHGVPAAATRSFILKIEPNEEVKKGLWKTHEVLNHGIAYYMNILKLIRQEAIYEHHEQDPKNPKKVSKAEIQAELWDFVLKMQKCNSFTHEVDKDEVFNILRELYEELVPSSVEKKGEANQLSNKFLYPLVDPNSQSGKGTASSGRKPRWYNLKIAGDPSWEEEKKKWEEDKKKDPLAKILGKLAEYGLIPLFIPYTDSNEPIVKEIKWMEKSRNQSVRRLDKDMFIQALERFLSWESWNLKVKEEYEKVEKEYKTLEERIKEDIQALKALEQYEKERQEQLLRDTLNTNEYRLSKRGLRGWREIIQKWLKMDENEPSEKYLEVFKDYQRKHPREAGDYSVYEFLSKKENHFIWRNHPEYPYLYATFCEIDKKKKDAKQQATFTLADPINHPLWVRFEERSGSNLNKYRILTEQLHTEKLKKKLTVQLDRLIYPTESGGWEEKGKVDIVLLPSRQFYNQIFLDIEEKGKHAFTYKDESIKFPLKGTLGGARVQFDRDHLRRYPHKVESGNVGRIYFNMTVNIEPTESPVSKSLKIHRDDFPKVVNFKPKELTEWIKDSKGKKLKSGIESLEIGLRVMSIDLGQRQAAAASIFEVVDQKPDIEGKLFFPIKGTELYAVHRASFNIKLPGETLVKSREVLRKAREDNLKLMNQKLNFLRNVLHFQQFEDITEREKRVTKWISRQENSDVPLVYQDELIQIRELMYKPYKDWVAFLKQLHKRLEVEIGKEVKHWRKSLSDGRKGLYGISLKNIDEIDRTRKFLLRWSLRPTEPGEVRRLEPGQRFAIDQLNHLNALKEDRLKKMANTIIMHALGYCYDVRKKKWQAKNPACQIILFEDLSNYNPYEERSRFENSKLMKWSRREIPRQVALQGEIYGLQVGEVGAQFSSRFHAKTGSPGIRCSVVTKEKLQDNRFFKNLQREGRLTLDKIAVLKEGDLYPDKGGEKFISLSKDRKCVTTHADINAAQNLQKRFWTRTHGFYKVYCKAYQVDGQTVYIPESKDQKQKIIEEFGEGYFILKDGVYEWVNAGKGGSGGSSEVEFSHEYWMRHALTLAKRARDEREVPVGAVLVLNNRVIGEGWNRAIGLHDPTAHAEIMALRQGGLVMQNYRLYDATLYVTFEPCVMCAGAMIHSRIGRVVFGVRNAKTGAAGSLMDVLHHPGMNHRVEITEGILADECAALLCRFFRMPRRVFNAQKKAQSSTDGSSGSETPGTSESATPESSGLKIKKGSSKQSSSELVDSDILKDSFDLASELKGEKLMLYRDPSGNVFPSDKWMAAGVFFGKLERILISKLTNQYSISTIEDDSSKQSMKRPAATKKAGQAKKKKGSYPYDVPDYAYPYDVPDYAYPYDVPDYA

SEQ ID NO: 12 - protein, 208 aa, Petromyzon marinus
  REGION 1..208: note = MISC_FEATURE - tr|A5H718|A5H718_PETMA Cytosine deaminase OS=Petromyzon marinusOX=7757 PE=2 SV=1 amino acid sequence; PmCDA1 polypeptide sequence
MTDAEYVRIHEKLDIYTFKKQFFNNKKSVSHRCYVLFELKRRGERRACFWGYAVNKPQSGTERGIHAEIFSIRKVEEYLRDNPGQFTINWYSSWSPCADCAEKILEWYNQELRGNGHTLKIWACKLYYEKNARNQIGLWNLRDNGVGLNVMVSEHYQCCRKIFIQSSHNQLNENRWLEKTLKRAEKRRSELSIMIQVKILHTTKSPAV

SEQ ID NO: 13 - DNA, 766 bp, Petromyzon marinus
  misc_feature 1..766: note = EF094822.1 Petromyzon marinus isolate PmCDA.21 cytosine deaminase mRNA, complete cds; PmCDA1 polynucleotide sequence
  source 1..766: mol_type = genomic DNA
tgacacgacacagccgtgtatatgaggaagggtagctggatggggggggggggaatacgttcagagaggacattagcgagcgtcttgttggtggccttgagtctagacacctgcagacatgaccgacgctgagtacgtgagaatccatgagaagttggacatctacacgtttaagaaacagtttttcaacaacaaaaaatccgtgtcgcatagatgctacgttctctttgaattaaaacgacggggtgaacgtagagcgtgtttttggggctatgctgtgaataaaccacagagcgggacagaacgtggaattcacgccgaaatctttagcattagaaaagtcgaagaatacctgcgcgacaaccccggacaattcacgataaattggtactcatcctggagtccttgtgcagattgcgctgaaaagatcttagaatggtataaccaggagctgcgggggaacggccacactttgaaaatctgggcttgcaaactctattacgagaaaaatgcgaggaatcaaattgggctgtggaacctcagagataacggggttgggttgaatgtaatggtaagtgaacactaccaatgttgcaggaaaatattcatccaatcgtcgcacaatcaattgaatgagaatagatggcttgagaagactttgaagcgagctgaaaaacgacggagcgagttgtccattatgattcaggtaaaaatactccacaccactaagagtcctgctgtttaagaggctatgcggatggttttc

SEQ ID NO: 14 - protein, 145 aa, Homo sapiens
  REGION 1..145: note = MISC_FEATURE - tr|Q6QJ80|Q6QJ80_HUMAN Activation-induced cytidine deaminase OS=Homo sapiens; OX = 9606 GN=AICDA PE=2 SV=1; AID polypeptide sequence
MDSLLMNRRKFLYQFKNVRWAKGRRETYLCYVVKRRDSATSFSLDFGYLRNKNGCHVELLFLRYISDWDLDPGRCYRVTWFTSWSPCYDCARHVADFLRGNPNLSLRIFTARLYFCEDRKAEPEGLRRLHRAGVQIAIMTFKAPV

SEQ ID NO: 15 - DNA, 10681 bp, Homo sapiens
  misc_feature 1..10681: note = NG_011588.1:5001-15681 Homo sapiens activation induced cytidine deaminase (AICDA), RefSeqGene (LRG_17) on chromosome 12; nucleic acid sequence of the CDS of human AID; polynucleotide sequence
  source 1..10681: mol_type = genomic DNA
agagaaccatcattaattgaagtgagatttttctggcctgagacttgcagggaggcaagaagacactctggacaccactatggacaggtaaagaggcagtcttctcgtgggtgattgcactggccttcctctcagagcaaatctgagtaatgagactggtagctatccctttctctcatgtaactgtctgactgataagatcagcttgatcaatatgcatatatattttttgatctgtctccttttcttctattcagatcttatacgctgtcagcccaattctttctgtttcagacttctcttgatttccctctttttcatgtggcaaaagaagtagtgcgtacaatgtactgattcgtcctgagatttgtaccatggttgaaactaatttatggtaataatattaacatagcaaatctttagagactcaaatcatgaaaaggtaatagcagtactgtactaaaaacggtagtgctaattttcgtaataattttgtaaatattcaacagtaaaacaacttgaagacacactttcctagggaggcgttactgaaataatttagctatagtaagaaaatttgtaattttagaaatgccaagcattctaaattaattgcttgaaagtcactatgattgtgtccattataaggagacaaattcattcaagcaagttatttaatgttaaaggcccaattgttaggcagttaatggcacttttactattaactaatctttccatttgttcagacgtagcttaacttacctcttaggtgtgaatttggttaaggtcctcataatgtctttatgtgcagtttttgataggttattgtcatagaacttattctattcctacatttatgattactatggatgtatgagaataacacctaatccttatactttacctcaatttaactcctttataaagaacttacattacagaataaagattttttaaaaatatatttttttgtagagacagggtcttagcccagccgaggctggtctctaagtcctggcccaagcgatcctcctgcctgggcctcctaaagtgctggaattatagacatgagccatcacatccaatatacagaataaagatttttaatggaggatttaatgttcttcagaaaattttcttgaggtcagacaatgtcaaatgtctcctcagtttacactgagattttgaaaacaagtctgagctataggtccttgtgaagggtccattggaaatacttgttcaaagtaaaatggaaagcaaaggtaaaatcagcagttgaaattcagagaaagacagaaaaggagaaaagatgaaattcaacaggacagaagggaaatatattatcattaaggaggacagtatctgtagagctcattagtgatggcaaaatgacttggtcaggattatttttaacccgcttgtttctggtttgcacggctggggatgcagctagggttctgcctcagggagcacagctgtccagagcagctgtcagcctgcaagcctgaaacactccctcggtaaagtccttcctactcaggacagaaatgacgagaacagggagctggaaacaggcccctaaccagagaagggaagtaatggatcaacaaagttaactagcaggtcaggatcacgcaattcatttcactctgactggtaacatgtgacagaaacagtgtaggcttattgtattttcatgtagagtaggacccaaaaatccacccaaagtcctttatctatgccacatccttcttatctatacttccaggacactttttcttccttatgataaggctctctctctctccacacacacacacacacacacacacacacacacacacacacacacaaacacacaccccgccaaccaaggtgcatgtaaaaagatgtagattcctctgcctttctcatctacacagcccaggagggtaagttaatataagagggatttattggtaagagatgatgcttaatctgtttaacactgggcctcaaagagagaatttcttttcttctgtacttattaagcacctattatgtgttgagcttatatatacaaagggttattatatgctaatatagtaatagtaatggtggttggtactatggtaattaccataaaaattattatccttttaaaataaagctaattattattggatcttttttagtattcattttatgttttttatgtttttgattttttaaaagacaatctcaccctgttacccaggctggagtgcagtggtgcaatcatagctttctgcagtcttgaactcctgggctcaagcaatcctcctgccttggcctcccaaagtgttgggatacagtcatgagccactgcatctggcctaggatccatttagattaaaatatgcattttaaattttaaaataatatggctaatttttaccttatgtaatgtgtatactggcaataaatctagtttgctgcctaaagtttaaagtgctttccagtaagcttcatgtacgtgaggggagacatttaaagtgaaacagacagccaggtgtggtggctcacgcctgtaatcccagcactctgggaggctgaggtgggtggatcgcttgagccctggagttcaagaccagcctgagcaacatggcaaaacgctgtttctataacaaaaattagccgggcatggtggcatgtgcctgtggtcccagctactagggggctgaggcaggagaatcgttggagcccaggaggtcaaggctgcactgagcagtgcttgcgccactgcactccagcctgggtgacaggaccagaccttgcctcaaaaaaataagaagaaaaattaaaaataaatggaaacaactacaaagagctgttgtcctagatgagctacttagttaggctgatattttggtatttaacttttaaagtcagggtctgtcacctgcactacattattaaaatatcaattctcaatgtatatccacacaaagactggtacgtgaatgttcatagtacctttattcacaaaaccccaaagtagagactatccaaatatccatcaacaagtgaacaaataaacaaaatgtgctatatccatgcaatggaataccaccctgcagtacaaagaagctacttggggatgaatcccaaagtcatgacgctaaatgaaagagtcagacatgaaggaggagataatgtatgccatacgaaattctagaaaatgaaagtaacttatagttacagaaagcaaatcagggcaggcatagaggctcacacctgtaatcccagcactttgagaggccacgtgggaagattgctagaactcaggagttcaagaccagcctgggcaacacagtgaaactccattctccacaaaaatgggaaaaaaagaaagcaaatcagtggttgtcctgtggggaggggaaggactgcaaagagggaagaagctctggtggggtgagggtggtgattcaggttctgtatcctgactgtggtagcagtttggggtgtttacatccaaaaatattcgtagaattatgcatcttaaatgggtggagtttactgtatgtaaattatacctcaatgtaagaaaaaataatgtgtaagaaaactttcaattctcttgccagcaaacgttattcaaattcctgagccctttacttcgcaaattctctgcacttctgccccgtaccattaggtgacagcactagctccacaaattggataaatgcatttctggaaaagactagggacaaaatccaggcatcacttgtgctttcatatcaaccatgctgtacagcttgtgttgctgtctgcagctgcaatggggactcttgatttctttaaggaaacttgggttaccagagtatttccacaaatgctattcaaattagtgcttatgatatgcaagacactgtgctaggagccagaaaacaaagaggaggagaaatcagtcattatgtgggaacaacatagcaagatatttagatcattttgactagttaaaaaagcagcagagtacaaaatcacacatgcaatcagtataatccaaatcatgtaaatatgtgcctgtagaaagactagaggaataaacacaagaatcttaacagtcattgtcattagacactaagtctaattattattattagacactatgatatttgagatttaaaaaatctttaatattttaaaatttagagctcttctatttttccatagtattcaagtttgacaatgatcaagtattactctttctttttttttttttttttttttttttgagatggagttttggtcttgttgcccatgctggagtggaatggcatgaccatagctcactgcaacctccacctcctgggttcaagcaaagctgtcgcctcagcctcccgggtagatgggattacaggcgcccaccaccacactcggctaatgtttgtatttttagtagagatggggtttcaccatgttggccaggctggtctcaaactcctgacctcagaggatccacctgcctcagcctcccaaagtgctgggattacagatgtaggccactgcgcccggccaagtattgctcttatacattaaaaaacaggtgtgagccactgcgcccagccaggtattgctcttatacattaaaaaataggccggtgcagtggctcacgcctgtaatcccagcactttgggaagccaaggcgggcagaacacccgaggtcaggagtccaaggccagcctggccaagatggtgaaaccccgtctctattaaaaatacaaacattacctgggcatgatggtgggcgcctgtaatcccagctactcaggaggctgaggcaggaggatccgcggagcctggcagatctgcctgagcctgggaggttgaggctacagtaagccaagatcatgccagtatacttcagcctgggcgacaaagtgagaccgtaacaaaaaaaaaaaaatttaaaaaaagaaatttagatcaagatccaactgtaaaaagtggcctaaacaccacattaaagagtttggagtttattctgcaggcagaagagaaccatcagggggtcttcagcatgggaatggcatggtgcacctggtttttgtgagatcatggtggtgacagtgtggggaatgttattttggagggactggaggcagacagaccggttaaaaggccagcacaacagataaggaggaagaagatgagggcttggaccgaagcagagaagagcaaacagggaaggtacaaattcaagaaatattggggggtttgaatcaacacatttagatgattaattaaatatgaggactgaggaataagaaatgagtcaaggatggttccaggctgctaggctgcttacctgaggtggcaaagtcgggaggagtggcagtttaggacagggggcagttgaggaatattgttttgatcattttgagtttgaggtacaagttggacacttaggtaaagactggaggggaaatctgaatatacaattatgggactgaggaacaagtttattttattttttgtttcgttttcttgttgaagaacaaatttaattgtaatcccaagtcatcagcatctagaagacagtggcaggaggtgactgtcttgtgggtaagggtttggggtccttgatgagtatctctcaattggccttaaatataagcaggaaaaggagtttatgatggattccaggctcagcagggctcaggagggctcaggcagccagcagaggaagtcagagcatcttctttggtttagcccaagtaatgacttccttaaaaagctgaaggaaaatccagagtgaccagattataaactgtactcttgcattttctctccctcctctcacccacagcctcttgatgaaccggaggaagtttctttaccaattcaaaaatgtccgctgggctaagggtcggcgtgagacctacctgtgctacgtagtgaagaggcgtgacagtgctacatccttttcactggactttggttatcttcgcaataaggtatcaattaaagtcggctttgcaagcagtttaatggtcaactgtgagtgcttttagagccacctgctgatggtattacttccatccttttttggcatttgtgtctctatcacattcctcaaatccttttttttatttctttttccatgtccatgcacccatattagacatggcccaaaatatgtgatttaattcctccccagtaatgctgggcaccctaataccactccttccttcagtgccaagaacaactgctcccaaactgtttaccagctttcctcagcatctgaattgcctttgagattaattaagctaaaagcatttttatatgggagaatattatcagcttgtccaagcaaaaattttaaatgtgaaaaacaaattgtgtcttaagcatttttgaaaattaaggaagaagaatttgggaaaaaattaacggtggctcaattctgtcttccaaatgatttcttttccctcctactcacatgggtcgtaggccagtgaatacattcaacatggtgatccccagaaaactcagagaagcctcggctgatgattaattaaattgatctttcggctacccgagagaattacatttccaagagacttcttcaccaaaatccagatgggtttacataaacttctgcccacgggtatctcctctctcctaacacgctgtgacgtctgggcttggtggaatctcagggaagcatccgtggggtggaaggtcatcgtctggctcgttgtttgatggttatattaccatgcaattttctttgcctacatttgtattgaatacatcccaatctccttcctattcggtgacatgacacattctatttcagaaggctttgattttatcaagcactttcatttacttctcatggcagtgcctattacttctcttacaatacccatctgtctgctttaccaaaatctatttccccttttcagatcctcccaaatggtcctcataaactgtcctgcctccacctagtggtccaggtatatttccacaatgttacatcaacaggcacttctagccattttccttctcaaaaggtgcaaaaagcaacttcataaacacaaattaaatcttcggtgaggtagtgtgatgctgcttcctcccaactcagcgcacttcgtcttcctcattccacaaaaacccatagccttccttcactctgcaggactagtgctgccaagggttcagctctacctactggtgtgctcttttgagcaagttgcttagcctctctgtaacacaaggacaatagctgcaagcatccccaaagatcattgcaggagacaatgactaaggctaccagagccgcaataaaagtcagtgaattttagcgtggtcctctctgtctctccagaacggctgccacgtggaattgctcttcctccgctacatctcggactgggacctagaccctggccgctgctaccgcgtcacctggttcacctcctggagcccctgctacgactgtgcccgacatgtggccgactttctgcgagggaaccccaacctcagtctgaggatcttcaccgcgcgcctctacttctgtgaggaccgcaaggctgagcccgaggggctgcggcggctgcaccgcgccggggtgcaaatagccatcatgaccttcaaaggtgcgaaagggccttccgcgcaggcgcagtgcagcagcccgcattcgggattgcgatgcggaatgaatgagttagtggggaagctcgaggggaagaagtgggcggggattctggttcacctctggagccgaaattaaagattagaagcagagaaaagagtgaatggctcagagacaaggccccgaggaaatgagaaaatggggccagggttgcttctttcccctcgatttggaacctgaactgtcttctacccccatatccccgcctttttttcctttttttttttttgaagattatttttactgctggaatacttttgtagaaaaccacgaaagaactttcaaagcctgggaagggctgcatgaaaattcagttcgtctctccagacagcttcggcgcatccttttggtaaggggcttcctcgctttttaaattttctttctttctctacagtcttttttggagtttcgtatatttcttatattttcttattgttcaatcactctcagttttcatctgatgaaaactttatttctcctccacatcagctttttcttctgctgtttcaccattcagagccctctgctaaggttccttttccctcccttttctttcttttgttgtttcacatctttaaatttctgtctctccccagggttgcgtttccttcctggtcagaattcttttctcctttttttttttttttttttttttttttaaacaaacaaacaaaaaacccaaaaaaactctttcccaatttactttcttccaacatgttacaaagccatccactcagtttagaagactctccggccccaccgacccccaacctcgttttgaagccattcactcaatttgcttctctctttctctacagcccctgtatgaggttgatgacttacgagacgcatttcgtactttgggactttgatagcaacttccaggaatgtcacacacgatgaaatatctctgctgaagacagtggataaaaaacagtccttcaagtcttctctgtttttattcttcaactctcactttcttagagtttacagaaaaaatatttatatacgactctttaaaaagatctatgtcttgaaaatagagaaggaacacaggtctggccagggacgtgctgcaattggtgcagttttgaatgcaacattgtcccctactgggaataacagaactgcaggacctgggagcatcctaaagtgtcaacgtttttctatgacttttaggtaggatgagagcagaaggtagatcctaaaaagcatggtgagaggatcaaatgtttttatatcaacatcctttattatttgattcatttgagttaacagtggtgttagtgatagatttttctattcttttcccttgacgtttactttcaagtaacacaaactcttccatcaggccatgatctataggacctcctaatgagagtatctgggtgattgtgaccccaaaccatctctccaaagcattaatatccaatcatgcgctgtatgttttaatcagcagaagcatgtttttatgtttgtacaaaagaagattgttatgggtggggatggaggtatagaccatgcatggtcaccttcaagctactttaataaaggatcttaaaatgggcaggaggactgtgaacaagacaccctaataatgggttgatgtctgaagtagcaaatcttctggaaacgcaaactcttttaaggaagtccctaatttagaaacacccacaaacttcacatatcataattagcaaacaattggaaggaagttgcttgaatgttggggagaggaaaatctattggctctcgtgggtctcttcatctcagaaatgccaatcaggtcaaggtttgctacattttgtatgtgtgtgatgcttctcccaaaggtatattaactatataagagagttgtgacaaaacagaatgataaagctgcgaaccgtggcacacgctcatagttctagctgcttgggaggttgaggagggaggatggcttgaacacaggtgttcaaggccagcctgggcaacataacaagatcctgtctctcaaaaaaaaaaaaaaaaaaaagaaagagagagggccgggcgtggtggctcacgcctgtaatcccagcactttgggaggccgagccgggcggatcacctgtggtcaggagtttgagaccagcctggccaacatggcaaaaccccgtctgtactcaaaatgcaaaaattagccaggcgtggtagcaggcacctgtaatcccagctacttgggaggctgaggcaggagaatcgcttgaacccaggaggtggaggttgcagtaagctgagatcgtgccgttgcactccagcctgggcgacaagagcaagactctgtctcagaaaaaaaaaaaaaaaagagagagagagagaaagagaacaatatttgggagagaaggatggggaagcattgcaaggaaattgtgctttatccaacaaaatgtaaggagccaataagggatccctatttgtctcttttggtgtctatttgtccctaacaactgtctttgacagtgagaaaaatattcagaataaccatatccctgtgccgttattacctagcaacccttgcaatgaagatgagcagatccacaggaaaacttgaatgcacaactgtcttattttaatcttattgtacataagtttgtaaaagagttaaaaattgttacttcatgtattcatttatattttatattattttgcgtctaatgattttttattaacatgatttccttttctgatatattgaaatggagtctcaaagcttcataaatttataactttagaaatgattctaataacaacgtatgtaattgtaacattgcagtaatggtgctacgaagccatttctcttgatttttagtaaacttttatgacagcaaatttgcttctggctcactttcaatcagttaaataaatgataaataattttggaagctgtgaagataaaataccaaataaaataatataaaagtgatttatatgaagttaaaataaaaaatcagtatgatggaataaacttg

SEQ ID NO: 16 - protein, 198 aa, Homo sapiens [sequence omitted]

SEQ ID NO: 17 - protein, 198 aa, Canis lupus
  REGION 1..198: note = MISC_FEATURE - Canine AID (clAID) polypeptide sequence
  REGION 1..30: note = MISC_FEATURE - Nuclear localization sequence
  REGION 183..198: note = MISC_FEATURE - Nuclear export signal
MDSLLMKQRKFLYHFKNVRWAKGRHETYLCYVVKRRDSATSFSLDFGHLRNKSGCHVELLFLRYISDWDLDPGRCYRVTWFTSWSPCYDCARHVADFLRGYPNLSLRIFAARLYFCEDRKAEPEGLRRLHRAGVQIAIMTFKDYFYCWNTFVENREKTFKAWEGLHENSVRLSRQLRRILLPLYEVDDLRDAFRTLGL

SEQ ID NO: 18 - protein, 199 aa, Bos taurus
  REGION 1..199: note = MISC_FEATURE - Bovine AID (btAID) polypeptide sequence
  REGION 1..30: note = MISC_FEATURE - Nuclear localization sequence
  REGION 183..199: note = MISC_FEATURE - Nuclear export signal
MDSLLKKQRQFLYQFKNVRWAKGRHETYLCYVVKRRDSPTSFSLDFGHLRNKAGCHVELLFLRYISDWDLDPGRCYRVTWFTSWSPCYDCARHVADFLRGYPNLSLRIFTARLYFCDKERKAEPEGLRRLHRAGVQIAIMTFKDYFYCWNTFVENHERTFKAWEGLHENSVRLSRQLRRILLPLYEVDDLRDAFRTLGL

SEQ ID NO: 19 - protein, 239 aa, Rattus sp.
  REGION 1..239: note = MISC_FEATURE - Rat AID polypeptide sequence
  REGION 1..26: note = MISC_FEATURE - Nuclear localization sequence
  REGION 194..239: note = MISC_FEATURE - Nuclear export signal
MAVGSKPKAALVGPHWERERIWCFLCSTGLGTQQTGQTSRWLRPAATQDPVSPPRSLLMKQRKFLYHFKNVRWAKGRHETYLCYVVKRRDSATSFSLDFGYLRNKSGCHVELLFLRYISDWDLDPGRCYRVTWFTSWSPCYDCARHVADFLRGNPNLSLRIFTARLTGWGALPAGLMSPARPSDYFYCWNTFVENHERTFKAWEGLHENSVRLSRRLRRILLPLYEVDDLRDAFRTLGL

SEQ ID NO: 20 - protein, 198 aa, Mus musculus [sequence omitted]

SEQ ID NO: 21 - protein, 229 aa, Rattus norvegicus [sequence omitted]

SEQ ID NO: 22 - protein, 229 aa, Mesocricetus auratus
  REGION 1..229: note = MISC_FEATURE - maAPOBEC-1 polypeptide sequence
MSSETGPVVVDPTLRRRIEPHEFDAFFDQGELRKETCLLYEIRWGGRHNIWRHTGQNTSRHVEINFIEKFTSERYFYPSTRCSIVWFLSWSPCGECSKAITEFLSGHPNVTLFIYAARLYHHTDQRNRQGLRDLISRGVTIRIMTEQEYCYCWRNFVNYPPSNEVYWPRYPNLWMRLYALELYCIHLGLPPCLKIKRRHQYPLTFFRLNLQSCHYQRIPPHILWATGFI

SEQ ID NO: 23 - protein, 236 aa, Pongo pygmaeus
  REGION 1..236: note = MISC_FEATURE - ppAPOBEC-1 polypeptide sequence
MTSEKGPSTGDPTLRRRIESWEFDVFYDPRELRKETCLLYEIKWGMSRKIWRSSGKNTTNHVEVNFIKKFTSERRFHSSISCSITWFLSWSPCWECSQAIREFLSQHPGVTLVIYVARLFWHMDQRNRQGLRDLVNSGVTIQIMRASEYYHCWRNFVNYPPGDEAHWPQYPPLWMMLYALELHCIILSLPPCLKISRRWQNHLAFFRLHLQNCHYQTIPPHILLATGLIHPSVTWR

SEQ ID NO: 24 - protein, 236 aa, Oryctolagus cuniculus
  REGION 1..236: note = MISC_FEATURE - ocAPOBEC1 polypeptide sequence
MASEKGPSNKDYTLRRRIEPWEFEVFFDPQELRKEACLLYEIKWGASSKTWRSSGKNTTNHVEVNFLEKLTSEGRLGPSTCCSITWFLSWSPCWECSMAIREFLSQHPGVTLIIFVARLFQHMDRRNRQGLKDLVTSGVTVRVMSVSEYCYCWENFVNYPPGKAAQWPRYPPRWMLMYALELYCIILGLPPCLKISRRHQKQLTFFSLTPQYCHYKMIPPYILLATGLLQPSVPWR

SEQ ID NO: 25 - protein, 235 aa, Monodelphis domestica
  REGION 1..235: note = MISC_FEATURE - mdAPOBEC-1 polypeptide sequence
MNSKTGPSVGDATLRRRIKPWEFVAFFNPQELRKETCLLYEIKWGNQNIWRHSNQNTSQHAEINFMEKFTAERHFNSSVRCSITWFLSWSPCWECSKAIRKFLDHYPNVTLAIFISRLYWHMDQQHRQGLKELVHSGVTIQIMSYSEYHYCWRNFVDYPQGEEDYWPKYPYLWIMLYVLELHCIILGLPPCLKISGSHSNQLALFSLDLQDCHYQKIPYNVLVATGLVQPFVTWR

SEQ ID NO: 26 - protein, 224 aa, Pongo pygmaeus
  REGION 1..224: note = MISC_FEATURE - ppAPOBEC-2 polypeptide sequence
MAQKEEAAAATEAASQNGEDLENLDDPEKLKELIELPPFEIVTGERLPANFFKFQFRNVEYSSGRNKTFLCYVVEAQGKGGQVQASRGYLEDEHAAAHAEEAFFNTILPAFDPALRYNVTWYVSSSPCAACADRIIKTLSKTKNLRLLILVGRLFMWEELEIQDALKKLKEAGCKLRIMKPQDFEYVWQNFVEQEEGESKAFQPWEDIQENFLYYEEKLADILK

SEQ ID NO: 27 - protein, 224 aa, Bos taurus
  REGION 1..224: note = MISC_FEATURE - btAPOBEC-2 polypeptide sequence
MAQKEEAAAAAEPASQNGEEVENLEDPEKLKELIELPPFEIVTGERLPAHYFKFQFRNVEYSSGRNKTFLCYVVEAQSKGGQVQASRGYLEDEHATNHAEEAFFNSIMPTFDPALRYMVTWYVSSSPCAACADRIVKTLNKTKNLRLLILVGRLFMWEEPEIQAALRKLKEAGCRLRIMKPQDFEYIWQNFVEQEEGESKAFEPWEDIQENFLYYEEKLADILK

SEQ ID NO: 28 - protein, 440 aa, Mus musculus
  REGION 1..440: note = MISC_FEATURE - mAPOBEC-3-(1) polypeptide sequence
MQPQRLGPRAGMGPFCLGCSHRKCYSPIRNLISQETFKFHFKNLGYAKGRKDTFLCYEVTRKDCDSPVSLHHGVFKNKDNIHAEICFLYWFHDKVLKVLSPREEFKITWYMSWSPCFECAEQIVRFLATHHNLSLDIFSSRLYNVQDPETQQNLCRLVQEGAQVAAMDLYEFKKCWKKFVDNGGRRFRPWKRLLTNFRYQDSKLQEILRPCYISVPSSSSSTLSNICLTKGLPETRFWVEGRRMDPLSEEEFYSQFYNQRVKHLCYYHRMKPYLCYQLEQFNGQAPLKGCLLSEKGKQHAEILFLDKIRSMELSQVTITCYLTWSPCPNCAWQLAAFKRDRPDLILHIYTSRLYFHWKRPFQKGLCSLWQSGILVDVMDLPQFTDCWTNFVNPKRPFWPWKGLEIISRRTQRRLRRIKESWGLQDLVNDFGNLQLGPPMS

SEQ ID NO: 29 - protein, 429 aa, Mus musculus
  REGION 1..429: note = MISC_FEATURE - APOBEC-3-(2) (Mouse APOBEC-3) polypeptide sequence
  REGION 71..108: note = MISC_FEATURE - Nucleic acid editing domain
  REGION 288..319: note = MISC_FEATURE - Nucleic acid editing domain
MGPFCLGCSHRKCYSPIRNLISQETFKFHFKNLGYAKGRKDTFLCYEVTRKDCDSPVSLHHGVFKNKDNIHAEICFLYWFHDKVLKVLSPREEFKITWYMSWSPCFECAEQIVRFLATHHNLSLDIFSSRLYNVQDPETQQNLCRLVQEGAQVAAMDLYEFKKCWKKFVDNGGRRFRPWKRLLTNFRYQDSKLQEILRPCYIPVPSSSSSTLSNICLTKGLPETRFCVEGRRMDPLSEEEFYSQFYNQRVKHLCYYHRMKPYLCYQLEQFNGQAPLKGCLLSEKGKQHAEILFLDKIRSMELSQVTITCYLTWSPCPNCAWQLAAFKRDRPDLILHIYTSRLYFHWKRPFQKGLCSLWQSGILVDVMDLPQFTDCWTNFVNPKRPFWPWKGLEIISRRTQRRLRRIKESWGLQDLVNDFGNLQLGPPMS

SEQ ID NO: 30 - protein, 430 aa, Rattus sp.
  REGION 1..430: note = MISC_FEATURE - APOBEC-3 polypeptide sequence
  REGION 72..109: note = MISC_FEATURE - Nucleic acid editing domain
  REGION 289..320: note = MISC_FEATURE - Nucleic acid editing domain
MGPFCLGCSHRKCYSPIRNLISQETFKFHFKNRLRYAIDRKDTFLCYEVTRKDCDSPVSLHHGVFKNKDNIHAEICFLYWFHDKVLKVLSPREEFKITWYMSWSPCFECAEQVLRFLATHHNLSLDIFSSRLYNIRDPENQQNLCRLVQEGAQVAAMDLYEFKKCWKKFVDNGGRRFRPWKKLLTNFRYQDSKLQEILRPCYIPVPSSSSSTLSNICLTKGLPETRFCVERRRVHLLSEEEFYSQFYNQRVKHLCYYHGVKPYLCYQLEQFNGQAPLKGCLLSEKGKQHAEILFLDKIRSMELSQVIITCYLTWSPCPNCAWQLAAFKRDRPDLILHIYTSRLYFHWKRPFQKGLCSLWQSGILVDVMDLPQFTDCWTNFVNPKRPFWPWKGLEIISRRTQRRLHRIKESWGLQDLVNDFGNLQLGPPMS

SEQ ID NO: 31 - protein, 199 aa, Homo sapiens
  REGION 1..199: note = MISC_FEATURE - hAPOBEC-3A polypeptide sequence
  REGION 70..106: note = MISC_FEATURE - Nucleic acid editing domain
MEASPASGPRHLMDPHIFTSNFNNGIGRHKTYLCYEVERLDNGTSVKMDQHRGFLHNQAKNLLCGFYGRHAELRFLDLVPSLQLDPAQIYRVTWFISWSPCFSWGCAGEVRAFLQENTHVRLRIFAARIYDYDPLYKEALQMLRDAGAQVSIMTYDEFKHCWDTFVDHQGCPFQPWDGLDEHSQALSGRLRAILQNQGN

SEQ ID NO: 32 - protein, 373 aa, Homo sapiens
  REGION 1..373: note = MISC_FEATURE - hAPOBEC-3F polypeptide sequence
  REGION 65..99: note = MISC_FEATURE - Nucleic acid editing domain
  REGION 248..283: note = MISC_FEATURE - Nucleic acid editing domain
MKPHFRNTVERMYRDTFSYNFYNRPILSRRNTVWLCYEVKTKGPSRPRLDAKIFRGQVYSQPEHHAEMCFLSWFCGNQLPAYKCFQITWFVSWTPCPDCVAKLAEFLAEHPNVTLTISAARLYYYWERDYRRALCRLSQAGARVKIMDDEEFAYCWENFVYSEGQPFMPWYKFDDNYAFLHRTLKEILRNPMEAMYPHIFYFHFKNLRKAYGRNESWLCFTMEVVKHHSPVSWKRGVFRNQVDPETHCHAERCFLSWFCDDILSPNTNYEVTWYTSWSPCPECAGEVAEFLARHSNVNLTIFTARLYYFWDTDYQEGLRSLSQEGASVEIMGYKDFKYCWENFVYNDDEPFKPWKGLKYNFLFLDSKLQEILE

SEQ ID NO: 33 - protein, 370 aa, Macaca mulatta
  REGION 1..370: note = MISC_FEATURE - Rhesus macaque APOBEC-3G polypeptide sequence
  REGION 1..61: note = MISC_FEATURE - Cytoplasmic localization signal
MVEPMDPRTFVSNFNNRPILSGLNTVWLCCEVKTKDPSGPPLDAKIFQGKVYSKAKYHPEMRFLRWFHKWRQLHHDQEYKVTWYVSWSPCTRCANSVATFLAKDPKVTLTIFVARLYYFWKPDYQQALRILCQKRGGPHATMKIMNYNEFQDCWNKFVDGRGKPFKPRNNLPKHYTLLQATLGELLRHLMDPGTFTSNFNNKPWVSGQHETYLCYKVERLHNDTWVPLNQHRGFLRNQAPNIHGFPKGRHAELCFLDLIPFWKLDGQQYRVTCFTSWSPCFSCAQEMAKFISNNEHVSLCIFAARIYDDQGRYQEGLRALHRDGAKIAMMNYSEFEYCWDTFVDRQGRPFQPWDGLDEHSQALSGRLRAI

SEQ ID NO: 34 - protein, 384 aa, Pan troglodytes
  REGION 1..384: note = MISC_FEATURE - Chimpanzee APOBEC-3G polypeptide sequence
  REGION 1..60: note = MISC_FEATURE - Cytoplasmic localization signal
  REGION 65..100: note = MISC_FEATURE - Nucleic acid editing domain
  REGION 257..291: note = MISC_FEATURE - Nucleic acid editing domain
MKPHFRNPVERMYQDTFSDNFYNRPILSHRNTVWLCYEVKTKGPSRPPLDAKIFRGQVYSKLKYHPEMRFFHWFSKWRKLHRDQEYEVTWYISWSPCTKCTRDVATFLAEDPKVTLTIFVARLYYFWDPDYQEALRSLCQKRDGPRATMKIMNYDEFQHCWSKFVYSQRELFEPWNNLPKYYILLHIMLGEILRHSMDPPTFTSNFNNELWVRGRHETYLCYEVERLHNDTWVLLNQRRGFLCNQAPHKHGFLEGRHAELCFLDVIPFWKLDLHQDYRVTCFTSWSPCFSCAQEMAKFISNNKHVSLCIFAARIYDDQGRCQEGLRTLAKAGAKISIMTYSEFKHCWDTFVDHQGCPFQPWDGLEEHSQALSGRLRAILQNQGN

SEQ ID NO: 35 - protein, 377 aa, Chlorocebus sabaeus
  REGION 1..377: note = MISC_FEATURE - Green monkey APOBEC-3G polypeptide sequence
  REGION 1..60: note = MISC_FEATURE - Cytoplasmic localization signal
  REGION 65..100: note = MISC_FEATURE - Nucleic acid editing domain
  REGION 257..290: note = MISC_FEATURE - Nucleic acid editing domain
MNPQIRNMVEQMEPDIFVYYFNNRPILSGRNTVWLCYEVKTKDPSGPPLDANIFQGKLYPEAKDHPEMKFLHWFRKWRQLHRDQEYEVTWYVSWSPCTRCANSVATFLAEDPKVTLTIFVARLYYFWKPDYQQALRILCQERGGPHATMKIMNYNEFQHCWNEFVDGQGKPFKPRKNLPKHYTLLHATLGELLRHVMDPGTFTSNFNNKPWVSGQRETYLCYKVERSHNDTWVLLNQHRGFLRNQAPDRHGFPKGRHAELCFLDLIPFWKLDDQQYRVTCFTSWSPCFSCAQKMAKFISNNKHVSLCIFAARIYDDQGRCQEGLRTLHRDGAKIAVMNYSEFEYCWDTFVDRQGRPFQPWDGLDEHSQALSGRLRAI

SEQ ID NO: 36 - protein, 384 aa, Homo sapiens
  REGION 1..384: note = MISC_FEATURE - Human APOBEC-3G polypeptide sequence
  REGION 1..60: note = MISC_FEATURE - Cytoplasmic localization signal
  REGION 65..100: note = MISC_FEATURE - Nucleic acid editing domain
  REGION 257..291: note = MISC_FEATURE - Nucleic acid editing domain
MKPHFRNTVERMYRDTFSYNFYNRPILSRRNTVWLCYEVKTKGPSRPPLDAKIFRGQVYSELKYHPEMRFFHWFSKWRKLHRDQEYEVTWYISWSPCTKCTRDMATFLAEDPKVTLTIFVARLYYFWDPDYQEALRSLCQKRDGPRATMKIMNYDEFQHCWSKFVYSQRELFEPWNNLPKYYILLHIMLGEILRHSMDPPTFTFNFNNEPWVRGRHETYLCYEVERMHNDTWVLLNQRRGFLCNQAPHKHGFLEGRHAELCFLDVIPFWKLDLDQDYRVTCFTSWSPCFSCAQEMAKFISKNKHVSLCIFTARIYDDQGRCQEGLRTLAEAGAKISIMTYSEFKHCWDTFVDHQGCPFQPWDGLDEHSQDLSGRLRAILQNQEN

SEQ ID NO: 37 - protein, 382 aa, Homo sapiens
  REGION 1..382: note = MISC_FEATURE - Human APOBEC-3B polypeptide sequence
  REGION 66..100: note = MISC_FEATURE - Nucleic acid editing domain
  REGION 251..289: note = MISC_FEATURE - Nucleic acid editing domain
MNPQIRNPMERMYRDTFYDNFENEPILYGRSYTWLCYEVKIKRGRSNLLWDTGVFRGQVYFKPQYHAEMCFLSWFCGNQLPAYKCFQITWFVSWTPCPDCVAKLAEFLSEHPNVTLTISAARLYYYWERDYRRALCRLSQAGARVTIMDYEEFAYCWENFVYNEGQQFMPWYKFDENYAFLHRTLKEILRYLMDPDTFTFNFNNDPLVLRRRQTYLCYEVERLDNGTWVLMDQHMGFLCNEAKNLLCGFYGRHAELRFLDLVPSLQLDPAQIYRVTWFISWSPCFSWGCAGEVRAFLQENTHVRLRIFAARIYDYDPLYKEALQMLRDAGAQVSIMTYDEFEYCWDTFVYRQGCPFQPWDGLEEHSQALSGRLRAILQNQGN

SEQ ID NO: 38 - protein, 395 aa, Rattus sp.
  REGION 1..395: note = MISC_FEATURE - Rat APOBEC-3B polypeptide sequence
MQPQGLGPNAGMGPVCLGCSHRRPYSPIRNPLKKLYQQTFYFHFKNVRYAWGRKNNFLCYEVNGMDCALPVPLRQGVFRKQGHIHAELCFIYWFHDKVLRVLSPMEEFKVTWYMSWSPCSKCAEQVARFLAAHRNLSLAIFSSRLYYYLRNPNYQQKLCRLIQEGVHVAAMDLPEFKKCWNKFVDNDGQPFRPWMRLRINFSFYDCKLQEIFSRMNLLREDVFYLQFNNSHRVKPVQNRYYRRKSYLCYQLERANGQEPLKGYLLYKKGEQHVEILFLEKMRSMELSQVRITCYLTWSPCPNCARQLAAFKKDHPDLILRIYTSRLYFWRKKFQKGLCTLWRSGIHVDVMDLPQFADCWTNFVNPQRPFRPWNELEKNSWRIQRRLRRIKESWGL

SEQ ID NO: 39 - protein, 226 aa, Bos taurus
  REGION 1..226: note = MISC_FEATURE - Bovine APOBEC-3B polypeptide sequence
DGWEVAFRSGTVLKAGVLGVSMTEGWAGSGHPGQGACVWTPGTRNTMNLLREVLFKQQFGNQPRVPAPYYRRKTYLCYQLKQRNDLTLDRGCFRNKKQRHAERFIDKINSLDLNPSQSYKIICYITWSPCPNCANELVNFITRNNHLKLEIFASRLYFHWIKSFKMGLQDLQNAGISVAVMTHTEFEDCWEQFVDNQSRPFQPWDKLEQYSASIRRRLQRILTAPI

SEQ ID NO: 40 - protein, 490 aa, Pan troglodytes
  REGION 1..490: note = MISC_FEATURE - Chimpanzee APOBEC-3B polypeptide sequence
MNPQIRNPMEWMYQRTFYYNFENEPILYGRSYTWLCYEVKIRRGHSNLLWDTGVFRGQMYSQPEHHAEMCFLSWFCGNQLSAYKCFQITWFVSWTPCPDCVAKLAKFLAEHPNVTLTISAARLYYYWERDYRRALCRLSQAGARVKIMDDEEFAYCWENFVYNEGQPFMPWYKFDDNYAFLHRTLKEIIRHLMDPDTFTFNFNNDPLVLRRHQTYLCYEVERLDNGTWVLMDQHMGFLCNEAKNLLCGFYGRHAELRFLDLVPSLQLDPAQIYRVTWFISWSPCFSWGCAGQVRAFLQENTHVRLRIFAARIYDYDPLYKEALQMLRDAGAQVSIMTYDEFEYCWDTFVYRQGCPFQPWDGLEEHSQALSGRLRAILQVRASSLCMVPHRPPPPPQSPGPCLPLCSEPPLGSLLPTGRPAPSLPFLLTASFSFPPPASLPPLPSLSLSPGHLPVPSFHSLTSCSIQPPCSSRIRETEGWASVSKEGRDLG

SEQ ID NO: 41 - protein, 190 aa, Homo sapiens
  REGION 1..190: note = MISC_FEATURE - Human APOBEC-3C polypeptide sequence
  REGION 65..100: note = MISC_FEATURE - Nucleic acid editing domain
MNPQIRNPMKAMYPGTFYFQFKNLWEANDRNETWLCFTVEGIKRRSVVSWKTGVFRNQVDSETHCHAERCFLSWFCDDILSPNTKYQVTWYTSWSPCPDCAGEVAEFLARHSNVNLTIFTARLYYFQYPCYQEGLRSLSQEGVAVEIMDYEDFKYCWENFVYNDNEPFKPWKGLKTNFRLLKRRLRESLQ

SEQ ID NO: 42 - protein, 190 aa, Gorilla sp.
  REGION 1..190: note = MISC_FEATURE - Gorilla APOBEC-3C polypeptide sequence
  REGION 65..100: note = MISC_FEATURE - Nucleic acid editing domain
MNPQIRNPMKAMYPGTFYFQFKNLWEANDRNETWLCFTVEGIKRRSVVSWKTGVFRNQVDSETHCHAERCFLSWECDDILSPNTNYQVTWYTSWSPCPECAGEVAEFLARHSNVNLTIFTARLYYFQDTDYQEGLRSLSQEGVAVKIMDYKDFKYCWENFVYNDDEPFKPWKGLKYNFRFLKRRLQEILE

SEQ ID NO: 43 - protein, 202 aa, Macaca mulatta
  REGION 1..202: note = MISC_FEATURE - Rhesus macaque APOBEC-3A polypeptide sequence
  REGION 72..103: note = MISC_FEATURE - Nucleic acid editing domain
MDGSPASRPRHLMDPNTFTFNFNNDLSVRGRHQTYLCYEVERLDNGTWVPMDERRGFLCNKAKNVPCGDYGCHVELRFLCEVPSWQLDPAQTYRVTWFISWSPCFRRGCAGQVRVFLQENKHVRLRIFAARIYDYDPLYQEALRTLRDAGAQVSIMTYEEFKHCWDTFVDRQGRPFQPWDGLDEHSQALSGRLRAILQNQGN

SEQ ID NO: 44 - protein, 185 aa, Bos taurus
  REGION 1..185: note = MISC_FEATURE - Bovine APOBEC-3A polypeptide sequence
  REGION 56..86: note = MISC_FEATURE - Nucleic acid editing domain
MDEYTFTENFNNQGWPSKTYLCYEMERLDGDATIPLDEYKGFVRNKGLDQPEKPCHAELYFLGKIHSWNLDRNQHYRLTCFISWSPCYDCAQKLTTFLKENHHISLHILASRIYTHNRFGCHQSGLCELQAAGARITIMTFEDFKHCWETFVDHKGKPFQPWEGLNVKSQALCTELQAILKTQQN

SEQ ID NO: 45 - protein, 200 aa, Homo sapiens
  REGION 1..200: note = MISC_FEATURE - Human APOBEC-3H polypeptide sequence
  REGION 54..88: note = MISC_FEATURE - Nucleic acid editing domain
MALLTAETFRLQFNNKRRLRRPYYPRKALLCYQLTPQNGSTPTRGYFENKKKCHAEICFINEIKSMGLDETQCYQVTCYLTWSPCSSCAWELVDFIKAHDHLNLGIFASRLYYHWCKPQQKGLRLLCGSQVPVEVMGFPKFADCWENFVDHEKPLSFNPYKMLEELDKNSRAIKRRLERIKIPGVRAQGRYMDILCDAEV

SEQ ID NO: 46 - protein, 210 aa, Macaca mulatta
  REGION 1..210: note = MISC_FEATURE - Rhesus macaque APOBEC-3H polypeptide sequence
MALLTAKTFSLQFNNKRRVNKPYYPRKALLCYQLTPQNGSTPTRGHLKNKKKDHAEIRFINKIKSMGLDETQCYQVTCYLTWSPCPSCAGELVDFIKAHRHLNLRIFASRLYYHWRPNYQEGLLLLCGSQVPVEVMGLPEFTDCWENFVDHKEPPSFNPSEKLEELDKNSQAIKRRLERIKSRSVDVLENGLRSLQLGPVTPSSSIRNSR

SEQ ID NO: 47 - protein, 386 aa, Homo sapiens
  REGION 1..386: note = MISC_FEATURE - Human APOBEC-3D polypeptide sequence
  REGION 78..109: note = MISC_FEATURE - Nucleic acid editing domain
  REGION 262..296: note = MISC_FEATURE - Nucleic acid editing domain
MNPQIRNPMERMYRDTFYDNFENEPILYGRSYTWLCYEVKIKRGRSNLLWDTGVFRGPVLPKRQSNHRQEVYFRFENHAEMCFLSWFCGNRLPANRRFQITWFVSWNPCLPCVVKVTKFLAEHPNVTLTISAARLYYYRDRDWRWVLLRLHKAGARVKIMDYEDFAYCWENFVCNEGQPFMPWYKFDDNYASLHRTLKEILRNPMEAMYPHIFYFHFKNLLKACGRNESWLCFTMEVTKHHSAVFRKRGVFRNQVDPETHCHAERCFLSWFCDDILSPNTNYEVTWYTSWSPCPECAGEVAEFLARHSNVNLTIFTARLCYFWDTDYQEGLCSLSQEGASVKIMGYKDFVSCWKNFVYSDDEPFKPWKGLQTNFRLLKRRLREILQ

SEQ ID NO: 48 - protein, 236 aa, Homo sapiens
  REGION 1..236: note = MISC_FEATURE - Human APOBEC-1 polypeptide sequence
MTSEKGPSTGDPTLRRRIEPWEFDVFYDPRELRKEACLLYEIKWGMSRKIWRSSGKNTTNHVEVNFIKKFTSERDFHPSMSCSITWFLSWSPCWECSQAIREFLSRHPGVTLVIYVARLFWHMDQQNRQGLRDLVNSGVTIQIMRASEYYHCWRNFVNYPPGDEAHWPQYPPLWMMLYALELHCIILSLPPCLKISRRWQNHLTFFRLHLQNCHYQTIPPHILLATGLIHPSVAWR

SEQ ID NO: 49 - protein, 229 aa, Mus musculus
  REGION 1..229: note = MISC_FEATURE - Mouse APOBEC-1 polypeptide sequence
MSSETGPVAVDPTLRRRIEPHEFEVFFDPRELRKETCLLYEINWGGRHSVWRHTSQNTSNHVEVNFLEKFTTERYFRPNTRCSITWFLSWSPCGECSRAITEFLSRHPYVTLFIYIARLYHHTDQRNRQGLRDLISSGVTIQIMTEQEYCYCWRNFVNYPPSNEAYWPRYPHLWVKLYVLELYCIILGLPPCLKILRRKQPQLTFFTITLQTCHYQRIPPHLLWATGLK

SEQ ID NO: 50 - protein, 224 aa, Homo sapiens
  REGION 1..224: note = MISC_FEATURE - Human APOBEC-2 polypeptide sequence
MAQKEEAAVATEAASQNGEDLENLDDPEKLKELIELPPFEIVTGERLPANFFKFQFRNVEYSSGRNKTFLCYVVEAQGKGGQVQASRGYLEDEHAAAHAEEAFFNTILPAFDPALRYNVTWYVSSSPCAACADRIIKTLSKTKNLRLLILVGRLFMWEEPEIQAALKKLKEAGCKLRIMKPQDFEYVWQNFVEQEEGESKAFQPWEDIQENFLYYEEKLADILK

SEQ ID NO: 51 - protein, 224 aa, Mus musculus
  REGION 1..224: note = MISC_FEATURE - Mouse APOBEC-2 polypeptide sequence
MAQKEEAAEAAAPASQNGDDLENLEDPEKLKELIDLPPFEIVTGVRLPVNFFKFQFRNVEYSSGRNKTFLCYVVEVQSKGGQAQATQGYLEDEHAGAHAEEAFFNTILPAFDPALKYNVTWYVSSSPCAACADRILKTLSKTKNLRLLILVSRLFMWEEPEVQAALKKLKEAGCKLRIMKPQDFEYIWQNFVEQEEGESKAFEPWEDIQENFLYYEEKLADILK

SEQ ID NO: 52 - protein, 224 aa, Rattus sp.
  REGION 1..224: note = MISC_FEATURE - Rat APOBEC-2 polypeptide sequence
MAQKEEAAEAAAPASQNGDDLENLEDPEKLKELIDLPPFEIVTGVRLPVNFFKFQFRNVEYSSGRNKTFLCYVVEAQSKGGQVQATQGYLEDEHAGAHAEEAFFNTILPAFDPALKYNVTWYVSSSPCAACADRILKTLSKTKNLRLLILVSRLFMWEEPEVQAALKKLKEAGCKLRIMKPQDFEYLWQNFVEQEEGESKAFEPWEDIQENFLYYEEKLADILK

SEQ ID NO: 53 - protein, 208 aa, Petromyzon marinus
  REGION 1..208: note = MISC_FEATURE - Petromyzon marinus CDA1 (pmCDAl) polypeptide sequence
MTDAEYVRIHEKLDIYTFKKQFFNNKKSVSHRCYVLFELKRRGERRACFWGYAVNKPQSGTERGIHAEIFSIRKVEEYLRDNPGQFTINWYSSWSPCADCAEKILEWYNQELRGNGHTLKIWACKLYYEKNARNQIGLWNLRDNGVGLNVMVSEHYQCCRKIFIQSSHNQLNENRWLEKTLKRAEKRRSELSFMIQVKILHTTKSPAV

SEQ ID NO: 54 - protein, 381 aa, Homo sapiens
  REGION 1..381: note = MISC_FEATURE - Human APOBEC3G D316R D317R polypeptide sequence
MKPHFRNTVERMYRDTFSYNFYNRPILSRRNTVWLCYEVKTKGPSRPPLDAKIFRGQVYSELKYHPEMRFFHWFSKWRKLHRDQEYEVTWYISWSPCTKCTRDMATFLAEDPKVTLTIFVARLYYFWDPDYQEALRSLCQKRDGPRATMKFNYDEFQHCWSKFVYSQRELFEPWNNLPKYYILLHFMLGEILRHSMDPPTFTFNFNNEPWVRGRHETYLCYEVERMHNDTWVLLNQRRGFLCNQAPHKHGFLEGRHAELCFLDVIPFWKLDLDQDYRVTCFTSWSPCFSCAQEMAKFISKKHVSLCIFTARIYRRQGRCQEGLRTLAEAGAKISFTYSEFKHCWDTFVDHQGCPFQPWDGLDEHSQDLSGRLRAILQNQEN

SEQ ID NO: 55 - protein, 182 aa, Homo sapiens
  REGION 1..182: note = MISC_FEATURE - Human APOBEC3G chain A polypeptide sequence
MDPPTFTFNFNNEPWWGRHETYLCYEVERMHNDTWVLLNQRRGFLCNQAPHKHGFLEGRHAELCFLDVIPFWKLDLDQDYRVTCFTSWSPCFSCAQEMAKFISKNKHVSLCIFTARIYDDQGRCQEGLRTLAEAGAKISFTYSEFKHCWDTFVDHQGCPFQPWDGLDEHSQDLSGRLRAILQ

SEQ ID NO: 56 - protein, 184 aa, Homo sapiens
  REGION 1..184: note = MISC_FEATURE - Human APOBEC3G chain A D120R D121R polypeptide sequence
MDPPTFTFNFNNEPWVRGRHETYLCYEVERMHNDTWVLLNQRRGFLCNQAPHKHGFLEGRHAELCFLDVIPFWKLDLDQDYRVTCFTSWSPCFSCAQEMAKFISKNKHVSLCIFTARIYRRQGRCQEGLRTLAEAGAKISFMTYSEFKHCWDTFVDHQGCPFQPWDGLDEHSQDLSGRLRAILQ

SEQ ID NO: 57 - protein, 367 aa, Homo sapiens
  REGION 1..367: note = MISC_FEATURE - hAPOBEC-4 polypeptide sequence
MEPIYEEYLANHGTIVKPYYWLSFSLDCSNCPYHIRTGEEARVSLTEFCQIFGFPYGTTFPQTKHLTFYELKTSSGSLVQKGHASSCTGNYIHPESMLFEMNGYLDSAIYNNDSIRHIILYSNNSPCNEANHCCISKMYNFLITYPGITLSIYFSQLYHTEMDFPASAWNREALRSLASLWPRVVLSPISGGIWHSVLHSFISGVSGSHVFQPILTGRALADRHNAYEINAITGVKPYFTDVLLQTKRNPNTKAQEALESYPLNNAFPGQFFQMPSGQLQPNLPPDLRAPVVFVLVPLRDLPPMHMGQNPNKPRNIVRHLNMPQMSFQETKDLGRLPTGRSVEIVEITEQFASSKEADEKKKKKGKK

SEQ ID NO: 58 - protein, 388 aa, Rattus norvegicus
  REGION 1..388: note = MISC_FEATURE - rAPOBEC-4 polypeptide sequence
MEPLYEEYLTHSGTIVKPYYWLSVSLNCTNCPYHIRTGEEARVPYTEFHQTFGFPWSTYPQTKHLTFYELRSSSGNLIQKGLASNCTGSHTHPESMLFERDGYLDSLIFHDSNIRHIILYSNNSPCDEANHCCISKMYNFLMNYPEVTLSVFFSQLYHTENQFPTSAWNREALRGLASLWPQVTLSAISGGIWQSILETFVSGISEGLTAVRPFTAGRTLTDRYNAYEINCITEVKPYFTDALHSWQKENQDQKVWAASENQPLHNTTPAQWQPDMSQDCRTPAVFMLVPYRDLPPIHVNPSPQKPRTVVRHLNTLQLSASKVKALRKSPSGRPVKKEEARKGSTRSQEANETNKSKWKKQTLFIKSNICHLLEREQKKIGILSSWSV

SEQ ID NO: 59 - protein, 363 aa, Macaca fascicularis
  REGION 1..363: note = MISC_FEATURE - mfAPOBEC-4 polypeptide sequence
MEPTYEEYLANHGTIVKPYYWLSFSLDCSNCPYHIRTGEEARVSLTEFCQIFGFPYGTTYPQTKHLTFYELKTSSGSLVQKGHASSCTGNYIHPESMLFEMNGYLDSAIYNNDSIRHIILYCNNSPCNEANHCCISKVYNFLITYPGITLSIYFSQLYHTEMDFPASAWNREALRSLASLWPRVVLSPISGGIWHSVLHSFVSGVSGSHVFQPILTGRALTDRYNAYEINAITGVKPFFTDVLLHTKRNPNTKAQMALESYPLNNAFPGQSFQMTSGIPPDLRAPVVFVLLPLRDLPPMHMGQDPNKPRNIIRHLNMPQMSFQETKDLERLPTRRSVETVEITERFASSKQAEEKTKKKKGKK

SEQ ID NO: 60 - protein, 218 aa, Rattus norvegicus
  REGION 1..218: note = MISC_FEATURE - rAPOBEC-1 (delta 177-186) polypeptide sequence
MSSETGPVAVDPTLRRRIEPHEFEVFFDPRELRKETCLLYEINWGGRHSIWRHTSQNTNKHVEVNFIEKFTTERYFCPNTRCSITWFLSWSPCGECSRAITEFLSRYPHVTLFIYIARLYHHADPRNRQGLRDLISSGVTIQIMTEQESGYCWRNFVNYSPSNEAHWPRYPHLWVRGLPPCLNILRRKQPQLTFFTIALQSCHYQRLPPHILWATGLK

SEQ ID NO: 61 - protein, 218 aa, Rattus norvegicus
  REGION 1..218: note = MISC_FEATURE - rAPOBEC-1 (delta 202-213) polypeptide sequence
MSSETGPVAVDPTLRRRIEPHEFEVFFDPRELRKETCLLYEINWGGRHSIWRHTSQNTNKHVEVNFIEKFTTERYFCPNTRCSITWFLSWSPCGECSRAITEFLSRYPHVTLFIYIARLYHHADPRNRQGLRDLISSGVTIQIMTEQESGYCWRNFVNYSPSNEAHWPRYPHLWVRLYVLELYCIILGLPPCLNILRRKQPQHYQRLPPHILWATGLK

SEQ ID NO: 62 - protein, 198 aa, Mus musculus
  REGION 1..198: note = MISC_FEATURE - mouse cytidine deaminase polypeptide sequence
  REGION 1..30: note = MISC_FEATURE - Nuclear localization sequence
  REGION 183..198: note = MISC_FEATURE - Nuclear export signal
MDSLLMKQKKFLYHFKNVRWAKGRHETYLCYVVKRRDSATSCSLDFGHLRNKSGCHVELLFLRYISDWDLDPGRCYRVTWFTSWSPCYDCARHVAEFLRWNPNLSLRIFTARLYFCEDRKAEPEGLRRLHRAGVQIGIMTFKDYFYCWNTFVENRERTFKAWEGLHENSVRLTRQLRRILLPLYEVDDLRDAFRMLGF

SEQ ID NO: 63 - protein, 224 aa, Petromyzon marinus
  REGION 1..224: note = MISC_FEATURE - pmCDA-1 polypeptide sequence
MAGYECVRVSEKLDFDTFEFQFENLHYATERHRTYVIFDVKPQSAGGRSRRLWGYIINNPNVCHAELILMSMIDRHLESNPGVYAMTWYMSWSPCANCSSKLNPWLKNLLEEQGHTLTMHFSRIYDRDREGDHRGLRGLKHVSNSFRMGVVGRAEVKECLAEYVEASRRTLTWLDTTESMAAKMRRKLFCILVRCAGMRESGIPLHLFTLQTPLLSGRVVWWRV

SEQ ID NO: 64 - protein, 331 aa, Petromyzon marinus
  REGION 1..331: note = MISC_FEATURE - pmCDA-2 polypeptide sequence
MELREVVDCALASCVRHEPLSRVAFLRCFAAPSQKPRGTVILFYVEGAGRGVTGGHAVNYNKQGTSIHAEVLLLSAVRAALLRRRRCEDGEEATRGCTLHCYSTYSPCRDCVEYIQEFGASTGVRVVIHCCRLYELDVNRRRSEAEGVLRSLSRLGRDFRLMGPRDAIALLLGGRLANTADGESGASGNAWVTETNVVEPLVDMTGFGDEDLHAQVQRNKQIREAYANYASAVSLMLGELHVDPDKFPFLAEFLAQTSVEPSGTPRETRGRPRGASSRGPEIGRQRPADFERALGAYGLFLHPRIVSREADREEIKRDLIVVMRKHNYQGP

SEQ ID NO: 65 - protein, 209 aa, Petromyzon marinus
  REGION 1..209: note = MISC_FEATURE - pmCDA-5 polypeptide sequence
MAGDENVRVSEKLDFDTFEFQFENLHYATERHRTYVIFDVKPQSAGGRSRRLWGYIINNPNVCHAELILMSMIDRHLESNPGVYAMTWYMSWSPCANCSSKLNPWLKNLLEEQGHTLMMHFSRIYDRDREGDHRGLRGLKHVSNSFRMGVVGRAEVKECLAEYVEASRRTLTWLDTTESMAAKMRRKLFCILVRCAGMRESGMPLHLFT

SEQ ID NO: 66 - protein, 158 aa, Saccharomyces cerevisiae
  REGION 1..158: note = MISC_FEATURE - yCD polypeptide sequence
MVTGGMASKWDQKGMDIAYEEAALGYKEGGVPIGGCLINNKDGSVLGRGHNMRFQKGSATLHGEISTLENCGRLEGKVYKDTTLYTTLSPCDMCTGAIIMYGIPRCVVGENVNFKSKGEKYLQTRGHEVVVVDDERCKKIMKQFIDERPQDWFEDIGE

SEQ ID NO: 67 - protein, 194 aa, synthetic construct
  REGION 1..194: note = cytidine deaminase polypeptide sequence
MKPQIRDHRPNPMEAMYPHIFYFHFENLEKAYGRNETWLCFTVEIIKQYLPVPWKKGVFRNQVDPETHCHAEKCFLSWFCNNTLSPKKNYQVTWYTSWSPCPECAGEVAEFLAEHSNVKLTIYTARLYYFWDTDYQEGLRSLSEEGASVEIMDYEDFQYCWENFVYDDGEPFKRWKGLKYNFQSLTRRLREILQ

SEQ ID NO: 68 - protein, 192 aa, synthetic construct
  REGION 1..192: note = cytidine deaminase polypeptide sequence
MADSSEKMRGQYISRDTFEKNYKPIDGTKEAHLLCEIKWGKYGKPWLHWCQNQRMNIHAEDYFMNNIFKAKKHPVHCYVTWYLSWSPCADCASKIVKFLEERPYLKLTIYVAQLYYHTEEENRKGLRLLRSKKVIIRVMDISDYNYCWKVFVSNQNGNEDYWPLQFDPWVKENYSRLLDIFWESKCRSPNPW

SEQ ID NO: 69 - protein, 280 aa, synthetic construct
  REGION 1..280: note = cytidine deaminase polypeptide sequence
MDPQRLRQWPGPGPASRGGYGQRPRIRNPEEWFHELSPRTFSFHFRNLRFASGRNRSYICCQVEGKNCFFQGIFQNQVPPDPPCHAELCFLSWFQSWGLSPDEHYYVTWFISWSPCCECAAKVAQFLEENRNVSLSLSAARLYYFWKSESREGLRRLSDLGAQVGIMSFQDFQHCWNNFVHNLGMPFQPWKKLHKNYQRLVTELKQILREEPATYGSPQAQGKVRIGSTAAGLRHSHSHTRSEAHLRPNHSSRQHRILNPPREARARTCVLVDASWICYR

SEQ ID NO: 70 - protein, 555 aa, synthetic construct
  REGION 1..555: note = pYY-BEM3.1; tr|F7B644|F7B644_HORSE polypeptide sequence
MPRGRARERQRRNPMEKLDAEAFSFHFLNMEFVYDRNCSYLCYQVEGRLSGSPVLSEQGVFPNEVCGKTRRHAELCFLDWFRGRLSPDEYYCVTWFISWSPCSNCAREVAEFLKRHRNVELSIFAARLYYCRDHEQGLQSLCNRGAQLAVMLRKDFTYCWDNFVHNSGREFSPWENIDANSDLLARKLEDLLKNPMEKLHRKTFSFHFRNLKFAKGRKCSYLCYRVEGRLSGSPGLSEQGVFLNEVCDENCRHAELCFLHWFRGRLSPHADYRVTWFISWSPCSNCAREVAEFLKQHRNVELHISAARLYYWQRNKPGLRNLRSSGAQLAIMFFWDFRDCWDNFVHNSGRHFIPWKKINVNSRLLATKLEDLLKNPLEKLHPNTFSFHFCNLEFAYDRKYSYLCYQVEGRLSGSPGLSEQGVFLNEVCGKTRCHAELCFLDWFRVRLSPDEYYRVTWFISWSPCFYCAREVADFLKQYRNVKLSIFAARLYYCRDHAQGLRSLCSSGAQLAIMFFWDFRYCWDNFVHNSGREFRPWKKINVNSRLLATKLEDILK

SEQ ID NO: 71 - protein, 437 aa, synthetic construct
  REGION 1..437: note = pYY-BEM3.2; tr|D1LZA1|D1LZA1_PANTI polypeptide sequence
MEPWRPSPRNPMDRIDPKTFRFQFPNLRYASGRKLCYLCFQVERDYFYYNDSDWGVFRNEVHPWAPCHAEQCFLSWFRDQYPYRDEDYNVTWFLSWSPCPTCAEEVVEFLEEYRNLTLSIFTSRLYYFWHPNYQEGLCKLWDAGVQLDIMSCDEFEYCWDNFVYHKGMRFQRRNLLKDYDFLAAKLQEILSPGQQRKRDWPFPPRPGAQVDPRSWVQEVTEPGINTRRHPLHLLVSFLLPRPTMNPLQEDIFYRQFGNQHRVPKPYYYRRKTYLCYQLKLPEGTLIDKDCLRNKKKRHAEICFIDKIKSLTRDTSQRFEIICYITWSPCPFCAEELVAFVKDNPHLSLRIFASRLYVHWRWKYQQGLRHLHASGIPVAVMSLPEFEDCWRNFVDHQDRLFQPWRNLDQYSESIKRRLGKILTPLNDLRNDFRNLKLE

SEQ ID NO: 72 - protein, 440 aa, synthetic construct
  REGION 1..440: note = pYY-BEM3.3; tr|A0A3Q0DM17|A0A3Q0DM17_TARSY polypeptide sequence
MPMKRMYSNIYFDHFNNQRLLSGQNAPWLCFKVERVENCMLVPLETGVFGNQVSGCCGKTERPVEPTSLTRSVLVSPNPGTELRAQQPSRKGHLGKLGCVEYPSPGLALVMLGYGASTYCPDSSMYCPETCHHPEMCFLYWFEKTLSHEEQYQITWYVSWSPCVNCAEEVAEFLSVHPKVNLTIYAARLYCYQKLNHRQGLRRLCKEGACVKIMNYEEFDHCWENFVYNNYKSFKPWVKLQDNYELLATELDKILRIPMERMPQKKFRFHFQNLIAKDRNTTWLCFEVKNVRKKHPPDLLERGIFQNQVTPRINCHAEMCFLSWFLENMLLHGKRYQVTWYISWSPCSICAEEVAEFLSAHPKVSLTIYAARLYYFWVPGYRQGLRRLVEEGARVEIMNYEEFDYCWENFVSINNEPFQPWEGLHEKYGYLVTKLNNILG

SEQ ID NO: 73 - protein, 453 aa, synthetic construct
  REGION 1..453: note = pYY-BEM3.4; tr|A0A3Q0DNJ5|A0A3Q0DNJ5_TARSY polypeptide sequence
MEDNPEPRPRQQMDQDTFIFNFNNDPSVRGRHQTFLCYEVEHLDDDTWVPQDKYLGFLHNQPQSRSNAYCAYHAELCFLELVSSWQLDPAQRYRVTCFISWSPCSSCAQEVAAFLKKNRHVTLRILAARIYDYYQGYEDGLRTLQGVGVDITVMTSAEFGHCWNTFVDHQGSPFQPWEGLDQHSQVIWQRMQDILQVIPAKYLMEKVKYTVTVDILFKGRVPGPRYLMDQNTFTRNFINNLSVSGRRQTLLCYEVERLGGDIWVPLDQLRGFLLSQARDVLNYYQGRHAEPCFLDLVSSWQLDPAQHYRVTWFISWSPCTSCAQAVAAFLRENRHVTLRILAARIYDYHQGYEEGLRTLQRTGAHIDIMTFKEFGHCWNTFVNHKGSPFKSWTGLDQHSQALRKRLQDILHTMASSLWDQSEPKKPIPSQEVTLPESIPPSHGNRFRLVKRPS

SEQ ID NO: 74 - protein, 424 aa, synthetic construct
  REGION 1..424: note = pYY-BEM3.5; tr|G5AYU5|G5AYU5_HETGA polypeptide sequence
FCFLSCVHRKPIERIYKKAFRFYFRNLRCAYGRNKTFLCYEVKRERDNKVLHKGVVLNQVEPYMPLHAELRFLSWFHDTLLCPLGSYQVTLYVSWSPCSECAEELTTFLAGHRNVTMTIYVAQLYYCNWKSPNREGLKILIAEDARLRVMFYDEFLYCWRNFVKNDYNNFDPWSLLDENSRYHNRILQNILKGWGRPHRVGPEGEQTATPGGSGGHCISVFSLLRRREMTLKEETFRVQFNNAYKAPKPYRRRVTYLCYQLQEANGDPLTKGCLRTKKGYHAESRFIKRICSMDLGQDQSYQVTCFLTWSPCPHCAQELVSFKRAHPHLRLQIFTARLFFHWKRSYQEGLQRLCRAQVPVAVMGHPEFAYCWDNFVDHQPGPFEPPWAKLEYYSSCLKRRLQQILRSWGVDDLTNDFRNLQLGP

SEQ ID NO: 75 - protein, 385 aa, synthetic construct
  REGION 1..385: note = pYY-BEM3.6; tr|A0A2Y9QMV5|A0A2Y9QMV5_TRIMA polypeptide sequence
MLSSPQTPGTRKPMKTLAPDEFSFNFENLRLAHGRNTTFLCFQVETKAPPSLNSPDSGIFQNQDHCPSHHHAEMVFLTWFQKRLSPAQHYEVTWYMSWSPCSRCAVQVAKFLKSNSTVNLSIFVARLYYPRELETKDGLHSLWQAGAQVQIMFFQDFKYCWENFVNNEGKPFQPWKNLDENSKDWDTELKDIHRNTTDLLTEEMFYSQFYNREKKSSIPRKTYLCYQLNEPQPVKRCLHYKKGYHAVTRFIDGIVSMNLDPARSYDITCYFTWSPCNRYARKLVSFIEDYPNLRLKVYTSRLYFHWCWTNMQGLQHLQNSRVTVAVMTFRDFEYCWKNFVDNQGKPFEPWEKLDLYSQSTERRLRRILKPLTPDVLNEDFGNLHL

SEQ ID NO: 76 - protein, 381 aa, synthetic construct
  REGION 1..381: note = pYY-BEM3.7; tr|H0XHI0|H0XHI0_OTOGA polypeptide sequence
LSCAFRDPMNRMYPKTFCQNFEKEPCPSNQNSSWLCFEVETKNSAVFFHRGVFRNQPAPPPRAPTSVLLSQGPVKTPCHAEECFLTWIQGVLPPDHHYHVTWYVSRGPCANCANLIVHFLAMHRRVTLTIFAAHLNFFWESDFQQGLLRMDQEGVQLHIMGYEEFEYCWDNFVYNQRKQFVPWNGLNENYEFMVSTLEDILRSPLDRIRQKDFSIHFRNSLWLDDKSTWLCFEVKRTKSPVPLYRGVFRNQSPPKTPCHAEVRFFTWLQDLPPDFCCQFTWYLSWSPCADCADLVANFLAKHRNVSLTIFVARLYYYRDPEMHRGLRRMYQEGANVDIMSVIEFEYCWDNFVYNQGKQFVPWNGLNENYEFLVPRLQEILE

SEQ ID NO: 77 - protein, 337 aa, synthetic construct
  REGION 1..337: note = pYY-BEM3.8; tr|A0A3M0K4Y7|A0A3M0K4Y7_HIRRU polypeptide sequence
MYISKKALRRHFDPRVYPRETYLLCELQWEGSRRVWIHWIRNVPDHHAEEYFLEEVFEPRNYGFCNITLYLSWSPCCTCCSKIRDFLKRNPNVKIDIRVARLIYPDYAETRSSLRELNGLQRVSIQVMEAAGLSCIESKNHRISQVERDPKGSSSPTLFTLQDHLKLSNMTESVIQDSVSIQICYQMRILGFQCHIRWKLQPEDFQRNYSPNQIGRVVYLLYEVRWRRGSIWRNWCSNNPEQHAEVNFLENHFHHRPQTPCSITWFLSTSPCGKCSRRILEFLKSQPNVTLEIYAAKLFRHHDIRNRQGLRNLMMNGVTIYIMNLEGNPASLCLSVD

SEQ ID NO: 78 - protein, 237 aa, synthetic construct
  REGION 1..237: note = pYY-BEM3.9; tr|A0A3P4LUZ8|A0A3P4LUZ8_GULGU polypeptide sequence
MSFEDYEYCWETFVDHKGMYFQSWDLLRDNDLLAAELKNILRSTMNPLRQEIFYHQFGNQPRAPRPYHRRKTYLCYQLQPHEGPITARVCLQNKKKRHAEIRFIDNIRALRLDRSQTFEITCYLTWSPCPTCAKALAVFVQDHPHISLRLFASRLFIHWCWKYQEGLRLLHRSRIPVAVMRLQEFEDCWRNFVDNQDEPFQPWNKLEQYSESITRRLRRILGHPQNNLENDFRNLHI

SEQ ID NO: 79 - protein, 221 aa, synthetic construct
  REGION 1..221: note = pYY-BEM3.10; tr|G5BPM8|G5BPM8_HETGA polypeptide sequence
RRRIEPWQFEASFDPRQLRRETCLLSEVRWGTSPRAWRGCSLNTARHAEVSFMDRLTSEGRLRGPVRCSITWFLSWSPCGACAQAIGEFLRQHPNVSLVIYIARLFWHVDEQNRQGLRDLVTRGVRMQVMSDPEFAHCWRNFVNYSPGQEARWPQVPPVWTWLYSLELHCILLNLPPCLKISRRHHNQLTFFQLILQNCHYQAIPSPVLLASGLIHPFVTW

SEQ ID NO: 80 - protein, 211 aa, synthetic construct
  REGION 1..211: note = pYY-BEM3.11; tr|H2M862|H2M862_ORYLA polypeptide sequence
MITKLDSVLLPKKKFIYHYKNMRWARGRHETYLCFVVKRRVGPESLSFDFGHLRNRNGCHVELLFLRHLSALCPGLWGYGATGQGRVSYSITWFCSWSPCANCSFRLAQFLSQTPNLRLRIFVSRLYFCDLEDSREREGLRMLKKVGVHITVMSYKDYFYCWQTFVARKQSKFKPWDGLHQNSVRLSRKLNRILQPCETEDFRDAFKLLGL

SEQ ID NO: 81 - protein, 353 aa, synthetic construct
  REGION 1..353: note = pYY-BEM3.12; tr|H0Y0C6|H0Y0C6_OTOGA polypeptide sequence
MYLKTFYRHFNNRPYLSRRNDTWLCFEVKTTSSNSPGSFYSGVFRNQGPRYCPWHTELCFLTWVRPIVSHHHFYQITWYMSWSPCANCAWQVATFLATHENVSLTNYTVRIYYFWRQDYRQGLLRMIEEGTQVYVMSSKEFQHCWENFVDHWGTRWVTCWNRLKKNYEFLVTRLSEILSDPKERISPNTFYNQFNNTPVPRGRKDTWLCFEVKEKNSNSPGSFHRGVFQNQVFSGTSSHARRCPPDHHYEVTWYTSWSPCAHCAWHVVNFLTSNPNVSLTIFAARLYYIYRPEIQQGLRRVFQEGAKVHIMSLKEFKYCWAKLVYNSGMRFMPWYQFNFNFLFPNTTLKGDLH

SEQ ID NO: 82 - protein, 189 aa, synthetic construct
  REGION 1..189: note = pYY-BEM3.13; tr|A0A3Q2Z5X6|A0A3Q2Z5X6_HIPCM polypeptide sequence
MDVHFMNFIYHYKNMRWAKGRNETYLCFVVKRRVGPNSLTFDFGHLRNRNGCHVELLFLRYLGRRLSYSITWFCSWSPCANCSAALSQFLSRMPNLRLRIFVARLYFCDMEDSHEREGLRLLQKAGVQVTVMSYKDYYYCWQTFVDRKKSHFKAWEDLHQNSVRLSRKLNRILQPCEMDLRDAFKLLGL

SEQ ID NO: 83 - protein, 190 aa, synthetic construct
  REGION 1..190: note = pYY-BEM3.15; tr|A0A2K6NY90|A0A2K6NY90_RHIRO polypeptide sequence
MNPHIRNPMEAMYPGTFYFHFKNLWEADNRNESWLCFAVEVIKHHSTVSWKRGVFRNQVDPETHCHAEKCFLSWFCDNTLSPKKNYQVTWYTSWSPCPECAREVAKFLARHSNVMLTIYTARLYYSQYPNYQEGLRRLNEEGVPVEIMDYEDFKYCWENFVYNGDELFKPWKGLKYNFLFLDSKLQEILE

SEQ ID NO: 84 - protein, 202 aa, synthetic construct
  REGION 1..202: note = pYY-BEM3.16; tr|Q6ICH2|Q6ICH2_HUMAN polypeptide sequence
MNPQIRNPMERMYRDTFYDNFENEPILYGRSYTWLCYEVKIKRGRSNLLWDTGVFRGPVLPKRQSNHRQEVDPETHCHAERCFLSWFCDDILSPNTNYEVTWYTSWSPCPECAGEVAEFLARHSNVNLTIFTARLCYFWDTDYQEGLCSLSQEGASVKIMGYKDFVSCWKNFVYSDDEPFKPWKGLQTNFRLLKRRLREILQ

SEQ ID NO: 85 - protein, 202 aa, synthetic construct
  REGION 1..202: note = pYY-BEM3.17; tr|G8GPV1|G8GPV1_CERNE polypeptide sequence
MDGSPASRPGHVMDPGTFTSNFNNKPWVSGQRETYLCYKVERSHNDTWVLLNQHRGFLRNQAKNRLHGDYGCHAELCFLGEVPSWRLDPTQTYRVTWFISWSPCFSGGCAEQVRAFLQENTHVRLRIFAARIYDYDFLYQEALRTLRDAGAQVSIMTYEEFKHCWDTFVDHQGRPFQPWDGLDEHSQALSGRLQAILQNQGN

SEQ ID NO: 86 - protein, 181 aa, synthetic construct
  REGION 1..181: note = pYY-BEM3.18; tr|Q1WBT6|Q1WBT6_SYMSY polypeptide sequence
MALLTAKTFRLQFNNKRRVTKPYYPRKALLCYQLTPQNGSTPTRGYFKNKKKRHAEIRFINKIKSMGLDETQCYQVTCYLTWSPCPSCAWELVDFIKAHDHLNLGIFASRLYYHWCRHQQEGLRLLCGSQVPVEVMGFPEFADCWENFVDHEEPLSFNPSEMLEELDKNSRAIKRRLEKIK

SEQ ID NO: 87 - protein, 211 aa, synthetic construct
  REGION 1..211: note = pYY-BEM3.19; tr|A0A3B4CS14|A0A3B4CS14_PYGNA polypeptide sequence
MDNTNRRKFIYHYKNVRWARGRHETYLCFVVKKRNSPDSLSFDFGHLRNRNGCHVELLFLRYIEVLCPGLWGSGVDGVRVSYAVTWFCSWSPCSNCAQRLTNFLSQTPNLRLRIFVARLYFCDEEDSLEREGLRHLQRAGVQITVMTYKDFFYCWQTFVASRERCFKAWEGLRQNSVRLSRKLNRILQVFISTPVISPLITTHLGQSWAGG

SEQ ID NO: 88 - protein, 315 aa, synthetic construct
  REGION 1..315: note = pYY-BEM3.20; tr|A0A087XZI4|A0A087XZI4_POEFO polypeptide sequence
RKVSYSVTWFCSWSPCANCSIRLAQFLHQTPNLRLRIFVSRLYFCDLEDSREREGLRILKKAGVHITVMSYKDYFYCWQTFVAKSQSKFKPWDGLHQNYIRLSRKLNRILQPALDIKKFIYHYKNLRWARGRCETYLCFVVKKKLHLFMFVIVGRNRLFDLNVTMNNKSLYLIPLHLQLLFLRHLGALCPGLWGYGVTGERKVSYSVTWFCSWSPCANCSIRLAQFLHQTPNLRLRIFVSRLYFCDLEDSREREGLRILKKAGVHITVMSYKDYFYCWQTFVAKSQSKFKPWDGLHQNYIRLSRKLNRILQVQFF

SEQ ID NO: 89 - protein, 189 aa, synthetic construct
  REGION 1..189: note = pYY-BEM3.21; tr|A0A341AEK4|A0A341AEK4_9CETA polypeptide sequence
MASDRGPSAGDATSRRRIEPWEFEVSFDPRELCKETRLLYEIKWGRSQHVWRHSGKNTTNHVECNFIEKFTSERPFHRSVSCCITWFLSWSPCWECSKAIREFLNQHPRVTLFIYVARLFQHMDPQNRQGLRDLIHSGVTIQIMGPTEYDYCWRNFVNYPPGKEAHWPRYPPPLMKLYALELHCIILVP

SEQ ID NO: 90 - protein, 180 aa, synthetic construct
  REGION 1..180: note = pYY-BEM3.22; tr|E2D879|E2D879_MUSMI polypeptide sequence
RNLISRETFNFNFENLCYAKGRKNTFLCYEVTRKDCDSPVSLCHGVFKNKGSIHAEICFLYWFHDKVLKVLTPREEFKVTWYMSWSPCFECAEQVVRFLATHHNLNLTIFSSRLYNVSDPDTQQKLCRLVQEGAQVAVMDLSEFKKCWEKFVDNDGQQFRPWKRLRTNFRYQNSKLQEIL

SEQ ID NO: 91 - protein, 221 aa, synthetic construct
  REGION 1..221: note = pYY-BEM3.23; tr|A0A2K5RDN6|A0A2K5RDN6_CEBCA polypeptide sequence
MWEAQSPGLSREWGSVAISPEDPGPLHIGRFLSCAFRHPMNAMYPGIFNFHFRNLRKAYGRNETWLCFTVEGIMNRSTVSWKSGVFRNQVGSDPFCHAEMCFLSWFRHNMLSPKKDYEVTWYASWSPCPECAGQVAEFLARHGNVRLTIFTAHLYYFWNPSFRQGLRRLSQEGASVLIMGYEDFEYCWDNFVYNDGQPFKPWKRLQDNSLSLYITLQEILQ

SEQ ID NO: 92 - protein, 206 aa, synthetic construct
  REGION 1..206: note = pYY-BEM3.24; tr|A0A2K5RDN7|A0A2K5RDN7_CEBCA polypeptide sequence
MEASPASRPRPLMGPRTFTENFTNNPEVFGRHQTYLCYEVKCQGPDGTRDLMTEQRDFLCNQARNLLSGFDGRHAERCFLDRVPSWRLDPAQTYRVTCFISWSPCFSCAREVAEFLQENPHVNLRIFAARIYDCRPRYEEGLQMLQNAGAQVSIMTSEEFRHCWDTFVDHQGHPFQPWEGLDEHSQALSRRLQAILQGNRWMILSL

SEQ ID NO: 93 - protein, 184 aa, synthetic construct
  REGION 1..184: note = pYY-BEM3.25; tr|A0A1C9CJ69|A0A1C9CJ69_CERAL polypeptide sequence
NPMKAMDPHIFYFHFKNLRKAYGRNETWLCFAVEIIKQRSTVPWRTGVFRNQVDPESHCHAERCFLSWFCEDILSPNTDYRVTWYTSWSPCLDCAGEVAEFLARHSNVELAIFAARLYYFWDTHYQQGLRSLSEKGASVEIMGYEDFKYCRENFVCDDGKPFKPWKGLKTNFRFLKRRLQEILE

SEQ ID NO: 94 - protein, 197 aa, synthetic construct
  REGION 1..197: note = pYY-BEM3.26; tr|A0A2R2Z4D2|A0A2R2Z4D2_PTEAL polypeptide sequence
MHLQVWRKVTEAWREGYTLKPWSRNPMERLYHDYFYFHFYNLPTPKHRNGCYICYQVEGTKKHSRMPLLRGVFENQESLDMMLSPGEKYRVTWYISWSPCFACVDEVIKFLREHTNVELIIFAARLYHSDILQYRQGLRKLHDAGVHVAIMSYYEFKHCLNDFVFHQGRSFCPWNDLNKNSKNLSNTLEDILRNQED

SEQ ID NO: 95 - protein, 206 aa, synthetic construct
  REGION 1..206: note = pYY-BEM3.27; tr|B7T161|B7T161_SHEEP polypeptide sequence
MTEGWAGSGLPGRGDCVWTPQTRNTMNLLRETLFKQQFGNQPRVPPPYYRRKTYLCYQLKELDDLMLDKGCFRNKKQRHAEIRFIDKINSLNLNPSQSYKIICYITWSPCPNCASELVDFITRNDHLNLQIFASRLYFHWIKPFCRGLHQLQKAGISVAVMTHTEFEDCWEQFVDNQLRPFQPWDKLEQYSASIRRRLQRILTAPT

SEQ ID NO: 96 - protein, 205 aa, synthetic construct
  REGION 1..205: note = pYY-BEM3.28; tr|A0A2R2X2G4|A0A2R2X2G4_PTEAL polypeptide sequence
MAGLGQACEGCCGQMPEISYPMGRLDPKTFSFEFKNLPYAYGRKSSYLCFQVEREQHSSPVPSDWGVFKNQFCGTEPYHAELCFLNWFRAEKLSPYEHYDVTWFLSWSPCSTCAEEIAIFLSNHKNVRLNIFVSRIYYFWKPAFRQGLQELDHLGVQLDAMSFDEFKYCWENFVDNQGMPFRCWKKVHQNYKSVLRKLNEILRRR

SEQ ID NO: 97 - protein, 309 aa, synthetic construct
  REGION 1..309: note = pYY-BEM3.29; tr|G1Q1M4|G1Q1M4_MYOLU polypeptide sequence
YAELSFLDLFQSWNLDRGRQYRLTWYMSWSPYPDCAQKLVEFLGENSHVTLRIFAADIHSLCSGYEDGLRKLRDARAQLAIMTRDELQYCWVTFVDNQGQPFRPWPNLVEHIKTKKQELKDILGNPMRRMYPKTFNFNFQNLNSYGRKSTFLCFEVETWEDGSVLDYQNGVFQNQLDPGHAELCFIEWFHEKVLFPDEVRCPDAQYHVTWYISWSPCFECAEQVAGFLNEHENVDLSISAARLYLCEDEDEQGLQDLVAAGAKVAMMAPEDFEYCWDNFVYNRGWPFTYWKHVRRNYGRLQEKLDEILW

SEQ ID NO: 98 - protein, 216 aa, synthetic construct
  REGION 1..216: note = pYY-BEM3.30; tr|A0A1S3AN78|A0A1S3AN78_ERIEU polypeptide sequence
RRIEPWEFEDFFDPRQFRPETCLLYEVRWGSSRNAWRSTARNTTRHAEVNFLERFAAERHFDKPVSCSITWFLSWSPCWECSQAIGAFLSQHPQVTLAIHVTRLFHHEDEQNRQGLRDLLARGVTLQVMGDSEYAHCWRTFVNSPPGAEGHYPRYPSDFTRLYALELHCIILGLPPCLEILRRYQNQFTLFRLVPQNCHYQMIPHLNFFVVRHYFF

SEQ ID NO: 99 - protein, 201 aa, synthetic construct
  REGION 1..201: note = pYY-BEM3.32; tr|Q4VUI3|Q4VUI3_XENLA polypeptide sequence
MTMDSMLLKRNKFIYHYKNLRWARGRHETYLCYIVKRRYSSVSCALDFGYLRNRNGCHAEMLFLRYLSIWVGHDPHRNYRVTWFSSWSPCYDCAKRTLEFLKGHPNFSLRIFSARLYFCEERNAEPEGLRKLQKAGVRLSVMSYKDYFYCWNTFVETRESGFEAWDGLHENSVRLARKLRRILQPPYDMEDLREVFVLLGL

SEQ ID NO: 100 - protein, 191 aa, synthetic construct
  REGION 1..191: note = pYY-BEM3.33; tr|E2RL86|E2RL86_CANLF polypeptide sequence
MNPLQEETFYQQFSNQRVPKPTYQRRTYLCYQLKPHEGSVIAKVCLQNQEKRHAEICFIDDIKSRQLDPSQKFEITCYVTWSPCPTCAKKLIAFVNDHPHISLRLFASRLYFHWRQKYKRELRHLQKSGIPLAVMSYLEFKDCWEKFVDHKGRPFQPWNKLKQYSESIGRRLQRILQPLNNLENDFRNLRL

SEQ ID NO: 101 - protein, 226 aa, synthetic construct
  REGION 1..226: note = pYY-BEM3.34; tr|G1LWB0|G1LWB0_AILME polypeptide sequence
SSAAPASIHLLDEDTFTENFRNDDWPSRTYLCYKVEGPDQGSGVPLGQDKGILHNKPAQGPEPSRHAECYLLEQIQSWNLDPKLHYGVTCFLSWSPCAKCAQKMARFLQENSHVSLKLFASRLYTRERWDEDYKEGLRTLKRAGASIAIMTYREFEHCWKTFVLHDQEGSCFQPWPFLHKESQKFSEKLQAILQVGVLLLSLPPPLPSSPLSSPWPFPAPLRASTG

SEQ ID NO: 102 - protein, 238 aa, synthetic construct
  REGION 1..238: note = pYY-BEM3.35; tr|A0A1U7S7K7|A0A1U7S7K7_ALLSI polypeptide sequence
MGEHWQYAGSGEYIPQDQFEENFDPSVLLAETHLLSELTWGGRPYKHWYENTEHCHAEIHFLENFSSKNRSCTITWYLSWSPCAECSARIADFMQENTNVKLNIHVARLYLHDDEHTRQGLRYLMKMKRVTIQVMTIPDYTYCWNTFLEDDGEDESDDYGGYAGVHEDEDESDDDDYLPTHFAPWIMLYSLELSCILQGFAPCLKIIQGNHMSPTFQLHVQDQEQKRLLEPANPWGAD

SEQ ID NO: 103 - protein, 220 aa, synthetic construct
  REGION 1..220: note = pYY-BEM3.36; tr|A0A2R2X2J8|A0A2R2X2J8_PTEVA polypeptide sequence
MPRIGNMNLLSEKTFNYHFGNQLRVKKPQGRRRTYLCYKLKLPNETLVKGYFINKKKNHAEIRFINKIRSLNLDQTQSYKITCYITWSPCSYCAGKLVALVKSCPHLSLQIFTSRLYYHWLWKNQAGLRYLWKINISVLVMKEPEFADCWDNFVNHQSRRFKPWEKLTQYSNSTERRLLRILRINRTDLFLAQSSEQDPGLNDLVDAIKRLFLDAHRPRD

SEQ ID NO: 104 - protein, 198 aa, synthetic construct
  REGION 1..198: note = pYY-BEM3.37; tr|A0A151P6M4|A0A151P6M4_ALLMI polypeptide sequence
MAVEEEKGLLGTSQGWKIELKDFQENYMPSTWPKVTHLLYEIRWGKGSKVWRNWCSNTLTQHAEVNCLENAFGKLQFNPPVPCHITWFLSWSPCCQCCRRILQFLRAHSHITLVIKAAQLFKHMDERNRQGLRDLVQSGVHVQVMDLPDYRYCWRTFVSHPHEGEGDFWPWFFPLWITFYTLELQHILLQQHALSYNL

SEQ ID NO: 105 - protein, 158 aa, synthetic construct
  REGION 1..158: note = pYY-BEM3.38; tr|A0A2K6MNR2|A0A2K6MNR2_RHIBE polypeptide sequence
IWLCFTMEIIKQCSTVSWKRGVFRNQVDPETHCHAERCFLSWFWEDTLSPNTNYQVTWYTSWSPCLDCAGEVAEFLARHSNVKLAIFAARLYYFWDTDYQQGLRSLSEEGTSVEIMGYEDFKYCWENFVYNGDEPFKPWKGLKYNFLFLDSKLQEILE

SEQ ID NO: 106 - protein, 182 aa, synthetic construct
  REGION 1..182: note = pYY-BEM3.40; tr|F1CGT0|F1CGT0_ANOCA polypeptide sequence
KAAILLSNLFFRWQMEPEAFQRNFDPREFPECTLLLYEIHWDNNTSRNWCTNKPGLHAEENFLQIFNEKIDIKQDTPCSITWFLSWSPCYPCSQAIIKFLEAHPNVSLEIKAARLYMHQIDCNKEGLRNLGRNRVSIMNLPDYRHCWTTFVVPRGANEDYWPQDFLPAITNYSRELDSILQD

SEQ ID NO: 107 - protein, 230 aa, synthetic construct
  REGION 1..230: note = pYY-BEM3.41; tr|C7AGG3|C7AGG3_HORSE polypeptide sequence
MDPQAPTQRGGLGQAYQGGDYVQAPGNGNTQHLLSEDVFKKQFGNQRRVTKPYYRRKTYVCYQLKLLRGPTIAKGYFRNKKKRHAEIRFIDKINSLGLDQDQSYEITCYVTWSPCATCACKLIKFTRKFPNLSLRIFVSRLYYHWFRQNQQGLRQLWASSIPVVVMGYQEFADCWENFADNRGNPFQSWEKLTEYSKGIKRRLQKILEPLNLNGLEDAMGNLKLGSVDLG

SEQ ID NO: 108 - protein, 197 aa, synthetic construct
  REGION 1..197: note = pYY-BEM3.42; tr|A0A250YMK7|A0A250YMK7_CASCN polypeptide sequence
MSLLKEDIFLYQFNNQQQVQKPYFRRRTYLCYQLEQPNGSRPQWPAKGCLQNKKGHHAEIRFIKRIHSMGLEQDQDYQITCYITWSPCLACACALAELKNHFPRLTLRIFASRLYFHWIRKFQMGLQHLYKSGVLVAVMSLPEFTDCWEKFVNHRQVFFTPWDKLEEHSRSIQRRLRRILQSWDVDDLTDDFRNLRL

SEQ ID NO: 109 - protein, 189 aa, synthetic construct
  REGION 1..189: note = pYY-BEM3.43; tr|B7T160|B7T160_SHEEP polypeptide sequence
MPWISDHVARLDPETFYFQFHNLLYAYGRNCSYICYRVKTWKHRSPVSFDWGVFHNQVYAGTHCHSERRFLSWFCAKKLRPDECYHITWFMSWSPCMKCAELVAGFLGMYQNVTLSIFTARLYYFQKPQYRKGLLRLSDQGACVDIMSYQEFKYCWKKFVYSQRRPFRPWKKLKRNYQLLAAELEDILG

SEQ ID NO: 110 - protein, 541 aa, synthetic construct
  REGION 1..541: note = pYY-BEM4.1; tr|A0A182D0J1|A0A182D0J1_BLAVI polypeptide sequence
MTNPESPPQAPCDFNEDALLNREPLRGSPIKFVSPVDYPDLVFALAGPVGVDIDYIQQSISDCLKSFDYSTEFIRITEIMQDIKCSKTIDCTDMLKEYQSKIEYANELRRAYRAKDLLAALTISAISKLREQIKERDEATNKSNIQPSRRKLAWVVRQLKTPEEVRLLRAVYGKQFVLVSIYSSPQRREDFLISKIKIKSRGTIDNNTSSEGAQRLIERDSKEDNEYGQNLSGTFCLGDIFVDSNNKESAIVSIDRFLNAFFGSNEISPTRDEYGMYLAKTASLRSCDLSRQVGAAIFSKTGEIISLGSNEVPKAGGGTYWTGDNADSRDIRLGHDPNEINKVEIFAEIISRLLEDKLLSNDLLNKDAASIVTILLSKNEGKRYKDLRVMDIIEFGRIIHAEMSAICDAARNGRAIIGATLFCTTFPCHLCAKHIVASGIGRIVYLEPYPKSYAKKLHSDSIQVEDHSDSEKVSFEPFIGISPSRYRELFEGGRRKDPFGEALKWKNDPRKPVIDVVVPPHFEAEKLVIAQLGKLIVSGTG

SEQ ID NO: 111 - protein, 330 aa, synthetic construct
  REGION 1..330: note = pYY-BEM4.2; tr|A0A2D6EXD2|A0A2D6EXD2_9ARCH polypeptide sequence
MIIGLVGTIGAGKQTIIDYLQEKYGYNALSCSDVLREILKKQGKPVTRDNLREIGNKTREEGGNGAIAKILLEKLRNNWKANYIVDSLRHPDEVSVLRTSPLFHLVAVDADLRIRFERVKARKREEEPTTLPAFVERDQKEMFGTGNEQRIRETMELADELVLNNGTVEELKQRIDDLNLVSDERLRPSWDDYFMRLARLAAQRSNCMSRKVGAIITKDRRVIATGYNGTPRGVKNCNEGGCERCNSAVAKGTAISECLCLHGEENAIIEAGRVRSEGATIYTSFLPCLWCTKMIIQAGLKEVVFSEVYDLHEASIKLFETSGVLIRRLK

SEQ ID NO: 112 - protein, 367 aa, synthetic construct
  REGION 1..367: note = pYY-BEM4.3; tr|F7YVM7|F7YVM7_9THEM polypeptide sequence
MNEFKYMSLALKLAKKGKYTTSPNPMVGAVIVKDGKILATGYHKKAGQPHAEINALSKLNFQAQNCEMYVTLEPCSHYGRTPPCADAIIRSGIRKVVIATLDPNPLVNGKGVEKLKNAGIEVVCGVLEEKAKKLNEKFFKYITTKIPFVALKIAQTLDGKIALKNGESKWITSEKSREYVHKLRMEYDAVLTGIGTILKDDPQLNVRLKKVYKQPLRIILDSKLKIPLSAKVLEDPSKVIILTTALADKEKLEELRSKGVEVIITNEKNGIVDLESALKILGEKKITSVMVEAGPTLLTSFLKESLFDKIYLFIAPKIFGADSKSVFSELGLEDISKSQKFSLESVKKIGEDLLLELYPKQLKKLEE

SEQ ID NO: 113 - protein, 449 aa, synthetic construct
  REGION 1..449: note = pYY-BEM4.4; tr|A0A3M6UNF1|A0A3M6UNF1_9CNID polypeptide sequence
MEEKSELENELMRSTSPKPSVPNGSKGNECEQRETRITKENLYMVLALWMEEFPVVEQTSSAKRLNKVGVVFVLPTDRVLAADCSRDGVHGVARVMVNHCGKLEGCKVFVSRKPCSLCAKLLVQSKVSRVFYLPIEPESENKGEIARADNLFKNSSVGQSVFVPCVEQKVLDKLEDKLPKEIITPDDISECRDNLLKKCGWSAEWFARAQASLPWPCFEGKMKSQVDNDFKSLIKWIAVVKAPMDKGVAFPKVKLTSDSRVVPDCDADNFPDSKTAYHMMIFAKMLARQTDDPKTGVGAVIVRGKVPDIVSLGWNGFPSKALYGEFPRASDDDRALQKKFPYVIHAEQNALMVRNVKDLTDGILFVTKPPCDECAPMIKLSGVKTIVIGEKIEKSRGGELSYNLIKEYIKEGIMTCYQMEATKTKAKRLASDPETRKRLKSSCSNSNDV

SEQ ID NO: 114 - protein, 414 aa, synthetic construct
  REGION 1..414: note = pYY-BEM4.5; tr|A0A2G3K826|A0A2G3K826_9BURK polypeptide sequence
MTKIIDDVNTAAAAVLDQATAAANQTTFAVGGVMVNNQTGEVISAIHNNVIIPLSNNVSFTFDPTAHGERQLVYWYYANKEALKLPEPNQITVITSLDPCAMCTGALLTAGFNVGVVAIDTYAGINCAQNFQFATLPANLRTKAQKNFGYYASGAANFKPLTRSYVGGPSVAFKNGVVTPANLRDCGTVFTQSVDTVRNTSNSTGLAPSQMSNPAELPSNSAILQAYRAIYKKAFTIKIDNPRLPDAQILTELKAVLADAPNARNAVAFIDPFGNLVLCMADAFNTSPVHAAFMNVTQEYAKTRWDLMNKYAQASTTDNPALYLTHPKYGTFVYLYAPDPDDSITIMSLGAYGSTMEGPIPNMFPSNLQFYYPPRNGAQFSELVPVVNELPPFYTQNVNISLMQVPGVTQAPTK

SEQ ID NO: 115 - protein, 308 aa, synthetic construct
  REGION 1..308: note = pYY-BEM4.6; tr|K1ZCJ4|K1ZCJ4_9BACT polypeptide sequence
MSSRAKKNRSTNLKKSIGQKSIENKPTDQKKDQVLVAYVPVIHEGYRRFFRHFPAVKELWLISQELSHELRSLQKDIRALKASETKKLLQTWGQFQKIKLLTPSSLAILQKTTTQLVFPDEEISHHLVEKYFAQNRVLFASFFLRWDKKSSLKKHDLQEYSEISNKEFDQMMIAIAQQEADKSDDWWRQVGGLIFKDETILLLAHNQHTPTEAEAYFAGDPRADFHQGEYLKISTAIHAEAYLIAQAAKQGISLEGADLYVTTFPCPVCAKQVAYSGIKRVFFREGYSLLDGETILKANGVKLIRVTV

SEQ ID NO: 116 - protein, 615 aa, synthetic construct
  REGION 1..615: note = pYY-BEM4.7; tr|A0A1G3PNQ8|A0A1G3PNQ8_9SPIR polypeptide sequence
MRDLPLLVLGLTGPMGAGCTRFARDISKMEPGKVIKKQGLLDQVAHEISELSKKASEIRLQCISNGKNSELAELKRLNRRLNAKLAERACLHVIAKSSLPEPLFISLNTIVIKIAVDSITAPEFAEWAKNHAKVADLLKWLRTQWESELTLYETWGQDAGRFSQDELEKMDAMFAEFERIGDEILKEDFETYFGKRNNDFSIRMFSENIRLSGNPFRPAENGGGGGKYDEPSMVMIARETDRYIRFYRTRSDQKRSHFFIIDEIKNPREAEYFRARHQNFFLVSIFSSSEIRASRMRRGLGHDAGVSDADFQHLFRELDSRDWGADDFDAHGLHRQNIYRCFNLADIAINNDVEDERFSEVLFNKFIRYYALMLSPGCVQPTPQETYMHLAYSLSLRSTCISRQVGAVITDLEDRILSLGWNEVPEGQIGCGLKVKKDYTDKENPLFEMEIWDNVITAEDLAVWDDEDSICVKDILSRIEIKTKLKSVSLTPEERADVLKALRIKRLEYSRSLHAEENAILQVASRGGVGLKDGTIYVTTFPCELCSKKIYQVGISKIYYTEPYPNSISEKVILKDGIRNIKILQFEGVKSYSYFKLFKPGFDKKDAQMLEGRGI

SEQ ID NO: 117 - protein, 291 aa, synthetic construct
  REGION 1..291: note = pYY-BEM4.8; tr|A0A1G0PGF4|A0A1G0PGF4_9BACT polypeptide sequence
MKHNNQLRKEIEKLLGQNSIIKNDELKKLQKEYKIETDELLISFLPYAAEFAKVPISKYKVGAVVLGKSGNIYFGSNMEFEAGALSATVHAEQSAVNNAWLNGETGINKIAVTAAPCGYCRQFLNELTTAKQLHVLLKDKNLEAAKVFKLTELLPEAFGPRDLEIEGGLMKVENHKLKIENINDELINAALEAANKSYAPYSKNYSGVSIQLSDGTIFSGRYSENAAYNPSLLPFQSALAFMNMNTKKGSNNKIVDAVLVEAVSNISQKDAAGTLLNSISKTKLRYYKIKN

SEQ ID NO: 118 - protein, 398 aa, synthetic construct
  REGION 1..398: note = pYY-BEM4.9; tr|A0A0P4WGY5|A0A0P4WGY5_9EUCA polypeptide sequence
MEENSSATSQPKCASRTKQGGNDLSTDMSNLSVGETKRTDFLPWDDYFMAVAFLSAMRSKDPSSQVGACIVNADKKIVGIGYNGMPIGCSDDELPWNKESLDPLQTKYMYVCHAEMNAIMNKNSSDLAGCCVYVALFPCNECAKLVIQAGIREVVFFSDKHQQKPETVASKKMLNMAGVAYRQYTPSQSKIELNLSLKEQEKSEPTADITQSSERDQNSKRKDYLSWEEYFMAMAHLSALRSKDPITQVGACIVNSKKKIVGIGYNGMPLGCNDDLMPWGNSSSNKLETKYMYVCHAGVNAIMNKNSCDVSGCTLYVALFPCNECAKVIIQAGIKTIIYASDTNKDQASILASKKMLDMAGIKYRADNLSQRKIVIDFKTIDWNSRFMNDHQNDPTCL

SEQ ID NO: 119 - protein, 259 aa, synthetic construct
  REGION 1..259: note = pYY-BEM4.10; tr|A0A3D8IG27|A0A3D8IG27_9HELI polypeptide sequence
MRKNILYFILTLFFLSGLYATSLPEDNVVSGVIYEKIDTVSAEVDHIYPMLALAIVYKDWQEKNMLNKQGHNIGLVIVDENNMPVFWVRNSVHATHNGTQHGEVRLVSNLLNCEGFNKYLDKYTLYTTLEPCIMCAGMLSMVQIPKVVYAQKDLSCGNTQEIISTAKYPRYYKAFTVENGYKKDLEECFEQYKICKNDSITDFLVNDSAKEIFRKASNDLQDYKVKFKENRRVIKVAQEFLQNIQTKDNLDVLQCPKNM

SEQ ID NO: 120 - protein, 256 aa, synthetic construct
  REGION 1..256: note = pYY-BEM4.11; tr|A0A351C8C4|A0A351C8C4_9BACT polypeptide sequence
MNELTKQSEHLRNEALRIATRSYVPYTGQQEGVIILLENGDLIPGVRVENASFQLTIPALQNALSTMYALQRTDISMIVSSIPFTDSDLAYTGGMAEIAWEMVGASLLLVAGAHIPEAGTFIDPARGENLLDVSREAALNAFIPESDFPVGSAIQTSDDVVIDGCNVEHSDWSKIICAERNVLSTARSYGLGQITTIYVSCPKEPGGTPCGACRQVIVELAPDATVWMDRGNQEPIAMKATKLLPGHFTGNVLKKQ

SEQ ID NO: 121 - protein, 301 aa, synthetic construct
  REGION 1..301: note = pYY-BEM4.12; tr|A0A1G6V2K7|A0A1G6V2K7_PEPNI polypeptide sequence
MPIVRVNEIGARLPEDWEALETAIWQAYVSREDLPDAGELDLTLVDDATIQELNKTHRQLDKSTDVLSFPMYDDRDDLAADVQAGLPVILGDIMISVPTAERQAQAYGHSFKREMAYLLVHGLLHIAGYDHMSAEEKSAMRRAEEAILADVDVPRDTAPSKTAAVLDEADVQALIDAARAARLQAYAPYSGYAVGAALLAADGRRFCGVNVENASYGATCCAERTALFAAVTAGARDFIALALVTEGDEPAPPCGLCRQALAEFSPDLAIYLAGPTGETYRRTSLAALFPEAFSLSTKESV

SEQ ID NO: 122 - protein, 528 aa, synthetic construct
  REGION 1..528: note = pYY-BEM4.13; tr|F2NP91|F2NP91_MARHT polypeptide sequence
MPVMETHALEARFKEALARLCPEGRLLAAVSGGGDSVALLYLLKAAGRDTIVAHLDHALRPDSAADAAFVEKLAQRLGFPLETEHVDVRALAHRKRINLEAAAREVRYAFLARVARRWKARCILTAHTLDDNAETVLLQILRGAGRGLGIRPLQRRVARPLLEFSRAELRAYLEARGARWLEDPTNRSLELDRNYLRHAVLPRITARFPHALEALARFSQAQQADDWALEALSARHLIPDRRWPVPAYRALPLERAPEALRRRAIRGVLEALGVRPEARLVADVEAALGGRAQTLPGGVVVRRQRGTLFFIPPTVRFPKVQPPAGLEARPPRPGDYLVFPYGRKRLVDFLNERGVPRELKRRWPVGAVGAEVRWVYGLWPEPDEDRYMRRALVLARAAARQGEVPIGAVLVRDGAVLAEAANAVEASRDATAHAELLALRTALRRVGEKVLPGATLYVTLEPCPMCYGAILEARVARVVYGVENLKAGAFTVHGLEPRVALEAGRVEGECAKVLKDFFARLRPGRDGA

SEQ ID NO: 123 - protein, 226 aa, synthetic construct
  REGION 1..226: note = pYY-BEM4.14; tr|A0A316TX77|A0A316TX77_9BACT polypeptide sequence
MINGYTPYSGNQNTCYVKGESGTFYPGVRIENVSYPLTISSVQAAVCSCLANSDNPVEYYTGDHQPELLQVWADEYDMKPGGKLPDSPLKLFDPLVPSIPDIKKELDVLTEKSVTPNSGFPVSALLQTEKGYIRGVNIELSSWALGLCAERVAISRALTAGYTQFKSIHIYAPEADFVSPCGACRQVLLEVMPDADTELYHGDGTLSKHIVSDLLPFGFTSHKLKK

SEQ ID NO: 124 - protein, 321 aa, synthetic construct
  REGION 1..321: note = pYY-BEM4.15; tr|R6VYG3|R6VYG3_9FIRM polypeptide sequence
MIHKGTQTIETKRLILRAFTPDDAEAAFENWMSDPKVTEFLRWKTHADISDSRKIVNEWANGSADPEFYQWAIVPKDVNEPIGTISVVDRNDALGIFHIGYCIGSKWWHKGITSEAFSAVIHFLFEEVGANRIESQHDPENIHSGDVMKKCGLTFEGTLRQADFNNRGIVDACVYSILQSEWQNNTSVWQRLYNAALTVQNDRVVSPFIDAGGVAAALMTKKGNIYTGICIDTASTLGMCAERNAVANMLTNGESRIDKIVAVMPDGKVGAPCGACREYMMQLDRDSGDIEILLDLETEKTVRLKDLIPDWWGAERFGDTE

SEQ ID NO: 125 - protein, 229 aa, synthetic construct
  REGION 1..229: note = pYY-BEM4.16; tr|A0A3C1HZ18|A0A3C1HZ18_9BACI polypeptide sequence
MGDIMENWNELSEPWKRCFLQAWKAYCHGSIPIGAVLVDSEGEIFLEGRNRVHELTAPEGQLCDCRIAHAEMNVLVQVKTSDYEKLSGATIYSTMEPCIQCFGAIILSRIKNISFAAIDDKLAGATTLEDRHGFIKSRNLNIAGPFSHLGEIQIILRTDFLLRIFDSEYADPLIAAHEKDYPIGVALGRHYHRNNRLQVAKKETIPFGELFNEFSFDIKRAREGYTLGK

SEQ ID NO: 126 - protein, 205 aa, synthetic construct
  REGION 1..205: note = pYY-BEM4.17; tr|A0A1M6KV24|A0A1M6KV24_9BACT polypeptide sequence
MEASQQNILLKIEGKGPVAEINFTVTLPEWLVEQVQSGSTVFLTQKEKMRFVLELARKNVAQETGGPFAAAVFSLESGELVSAGVNVVVESRCSSAHAEVVALSLAQKAVDSHDLGAAGLPRMVLVSSAEPCAMCMGAIPWSGVKQVICGARDEDVRSVGFDEGAKPLEWVEDFAERGIEVIRDVLREEATEVLWDYRERGGEIY

SEQ ID NO: 127 - protein, 207 aa, synthetic construct
  REGION 1..207: note = pYY-BEM4.18; tr|A0A2U0T9B4|A0A2U0T9B4_9RHIZ polypeptide sequence
METAELISRLLDVIEKDIAPVTAKGVARGNKLFGAAILKKSDLAVIVAETNNEIENPLWHGEMQAIKRFFELPADQRPATRDCLFLATHEPCSLCLSGITWSGFDNFYYLFSHQDSRDGFAIPYDIQILKSVYAVPEPETGTVSPARDLYNRSNDFWTSHGLQDMIAGLARSNREALLARIDDLNALYAELSERYQRDKGGKGIPLP

SEQ ID NO: 128 - protein, 231 aa, synthetic construct
  REGION 1..231: note = pYY-BEM4.19; tr|A0A2K9PN08|A0A2K9PN08_9FLAO polypeptide sequence
MSDKKESKIKISKTSESIELDEIHSLLSYSIVQKFWENDDRNGRGYNVGVILVDENKNIVDWDINSVNKTENSTQHGEMRLISRYLDKDELYSLKGYTMYPTLEPCAMCAGMMTMTNVYRTVNGQMDYFYSKALERLSIDTRECGGYPPYPRTVISEISPSSISTRLDAEYKQYTNAGNKPIITKFLSTYKAKTIYDDAFNQFINFKCKFPENKTKYENAIKFYNSLPESI

SEQ ID NO: 129 - protein, 330 aa, synthetic construct
  REGION 1..330: note = pYY-BEM4.20; tr|F4PWM7|F4PWM7_CAVFA polypeptide sequence
MRFSLSLLFVILSVLLAGVLACKDPYNPETVDYGQCASATKANYEVRSDSKVLTPADLPADELAVHESRMRHIIDIARVNNKKFVSSIYFPNGTLACIGINTGKPNMIAHGEIVAIQNCTEIHGISMYTNYSIYTTGEPCSMCASAILWSRFKTVVWSTYNSDLYCKICMSNIPIDSSYIFSRAYGLGIEAPVAIGGVVKAEGDAWFGTYCNRPTSIYYIAPKCACQDPAKVSPLKFTQTRTTVWVEGGDKVVTQWNAIISNPSNSTIVDPPIVISPSVVFKGAPWGISAASEPNTYKLSYNKVLFPGQTFSFGYSVYGLEEVAFTALEA

SEQ ID NO: 130 - protein, 193 aa, synthetic construct
  REGION 1..193: note = pYY-BEM4.21; tr|U7QZM1|U7QZM1_PHOTE polypeptide sequence
MNKTRRKLLATLGIMSISMSFIAQAGEKKTQVINNILSKQEITEHEKYMREAIKEAIKNPKHPFGAVIVNRNNGEILSRGVNTGRNNPILHGEIQAINHYITQYGNQGWENVALYTTGEPCSMCMSALVWIGIREVIWATSISVIRNSGIRQIDISAHEIAERASSFYNPITLVGGILANETDKLFLERKRGN

SEQ ID NO: 131 - protein, 319 aa, synthetic construct
  REGION 1..319: note = pYY-BEM4.22; tr|A0A081CH48|A0A081CH48_PSEA2 polypeptide sequence
MASRRHLLATQVTGNHRKLSLWHLRGWLSPYTKLVDAVYFLTTNSFYHSLQTPPVQSITMLLSSIITSLALAAQASAYREGLHPEFQSGLSINSVPATDRDHWMRLANSAIYYPPVSHPCPQAPFGTAIVNTTSNELICAIANRVGSTGDPTQHGEITAIQHCTNVMRKKGLSPQEIIAAWKQLSLYTNAEPCTMCLSAIRWAGFKEVIYGTSVGTISENGRNQIYIPSNLVLEKSYSFGHATLMLGNILTHETDPFFQHQFNESAPCPVGCERTQVGEARVKTCEPVPNWQKLVRLEYSEDSRVGSEPVAHTPLHLEL

SEQ ID NO: 132 - protein, 203 aa, synthetic construct
  REGION 1..203: note = pYY-BEM4.23; tr|A0A3D3HMU1|A0A3D3HMU1_9GAMM polypeptide sequence
MDYSDAILGAITSIRRNSKQPGVNVTDNVTDSSTQYNNDEYWMRRALALAREAGEAGEIPVGAVLVKDNQQVAGGFNQPIRSHDPAAHAEILTLREAGAVLGNYRLIDTTLYVTLEPCMMCAGALVHSRIKRLVFGAAEPKTGAAGSFIDLLTLPRLNHYMEVTGGVLGEECSVLLSDFFRRRRAEKKALKRQNSESGSDSAS

SEQ ID NO: 133 - protein, 270 aa, synthetic construct
  REGION 1..270: note = pYY-BEM4.24; tr|A0A1N5WT13|A0A1N5WT13_9ACTN polypeptide sequence
MLEKIERRLVAAAEAVVRSPSTGDAHTVAAAAMDANGDIYSGVNVFHFTGGPCAELVVIGSAAAANAPPLITIVAVGDGDRGVIAPCGRCRQVMLDLHPDVFVIVPTGDGQLAAKPVRELLPFGYVARTGSTAPRVVYFHPRHYDTISSGLKTATVRFQDSVQTGPAVFVFDDGESIRRLDAVVEKVESRRLDHLTEEDAHHEALPDSDALRDAIKTQYPMLGDGDVVDVATFRLTAISAPDPDPRSSYPPAVSRCNPAGPRADLLVGQS

SEQ ID NO: 134 - protein, 257 aa, synthetic construct
  REGION 1..257: note = pYY-BEM4.25; tr|X0SAC5|X0SAC5_9ZZZZ polypeptide sequence
MTKDGRVIASAHDTEVTDQDSTAHAEINAIRKASKIYRKDLTGCLIISTHEPCPMCTGSIIWSNISKVVYGVSIRDSIKAGRDMINLSCKEIIKKPNAEINIYDGILKKECLKLYNNDTRKLVKKFRKYEWINIEENLLNKRMQWFENNKTMIRKLKGNDLEKAYHLILMKIGIKRSEAPIVKKSESKIIFHSKNYCPSLEACIILDLDTREVCKEIYERPTEELIRRLNSKLRFTRNYDCIRPYSDYCEEIIILEK

SEQ ID NO: 135 - protein, 154 aa, synthetic construct
  REGION 1..154: note = pYY-BEM4.26; tr|A0A3B8IC10|A0A3B8IC10_9BACT polypeptide sequence
MPSHEDFIHQCLELGKEALLQGNPPVGSVIVWQDQVIGRGIENGRSSGDITQHAELLALQEAVATGQRDKLKEAIIYSTHEPCVMCAYPIRQYKIPTVVYSVAVPELGGHTSSWHLLTTEDVPKWGKAPKIITGISAEEVEALNAAFQDSLKKG

SEQ ID NO: 136 - protein, 180 aa, synthetic construct
  REGION 1..180: note = pYY-BEM4.27; tr|A0A2N9P8B9|A0A2N9P8B9_9FLAO polypeptide sequence
MFIFKLISPPVSIEVYQDKIIQKLYICFMENIFTDEYFMKKALQEAETAFQQGEIPVGAVIVIDNRIIARSHNLTEMLNDVTAHAEMQAITASANFLGGKYLKDCTLYVTLEPCQMCAGALYWSQISKIVYGATDEQRGYRAMGAQLHPKTKVISGIMQNECTHLMKDFFKQRRSKSTKD

SEQ ID NO: 137 - protein, 178 aa, synthetic construct
  REGION 1..178: note = pYY-BEM4.28; tr|K1KX30|K1KX30_9BACT polypeptide sequence
MVKNPVNNNELYFGKHSEIPMNEEQKAYMKMAVDLSRSGMESGKGGPFGCVIVKDGKVIGIGSNSVLETNDPTAHAEIVAIRDACRNLGHFQLDGCEVYTSCEPCPMCLGAIYWARPSKVFFANDKRDAAEAGFDDDFIYQELELPYEKRKIPFEQGMQDTAKEVFQEWILKEDKTLY

SEQ ID NO: 138 - protein, 196 aa, synthetic construct
  REGION 1..196: note = pYY-BEM4.29; tr|R4XI84|R4XI84_TAPDE polypeptide sequence
MSSEIEPPSTDVHKHAVAEAADESGAADAFMQIALQQAETALLNKEVPVGCVFVHQPTGTVLATGANQTNASLNGTLHAEFVAIESILRDHPPSIFRESDLYVTVEPCVMCASALRQLQVRKVYFGCGNDRFGGCGSVFSIHSDASKTGDAAYMVESGIFRKEAIMLLRRFYLLQNESAPKPALKSTRVLKEHFDE

SEQ ID NO: 139 - protein, 212 aa, synthetic construct
  REGION 1..212: note = pYY-BEM4.30; tr|A0A239CVF7|A0A239CVF7_9DELT polypeptide sequence
MSPASKKHFPSLFSFLLLTIGLICGTAHAQPQGHTADDTAATLANASLKEHEPFIRRCYQLAIDAGKKGNHPFGALLVHKGKIVLEAENTVLTDNDFTNHAEMNLIAEAARTLSRQIIPEATVYTSCAPCAMCTATLAMAGFTRIVYGVSHDALNKRFGLKGKSVSCPALFKTMGMELEFVGPVLEKEGLRVFDFWPEKDPHAQMLKKQARK

SEQ ID NO: 140 - protein, 320 aa, synthetic construct
  REGION 1..320: note = pYY-BEM4.31; tr|A0A1Q3NME1|A0A1Q3NME1_9BACT polypeptide sequence
MTEFNYDWAKLAFSSKRPLTNLKATFIIAPREISEKRFTQLLKEYLPKGDILLGISKEDYVEGLEGQPQFAMLQQKTLQKLIDKVNDASAHKVYTLRYFQRELPAIIEKLTPPRVVGIHGSWHHSFHTLPIYYLLSEKRIPYQLVAAFSDEDEARAYEVATDKKIVRPTLEGSFDDTTVLQLTDEVAKSSYDYGFQTGAILAEKVNGVYQPVAAGFNKVVPYQTYALLNGASRETNFSPANDMNHYDTIHAEMQILVEAAKQGISLKDKTLFVNLMPCPSCARTLSQTELSEIVYRIDHSGGYAVDLLTKVGKDIRRIVY

SEQ ID NO: 141 - protein, 180 aa, synthetic construct
  REGION 1..180: note = pYY-BEM4.32; tr|A0A2G6N4N7|A0A2G6N4N7_9DELT polypeptide sequence
MKERTVSYSDRHFMAEALEMAESALTQGEFPVGCVIADGTAVVARGHRTGTTAGAVNEIDHAEINALRHLGLAGEHLDRTDLTIYSTMEPCLMCFAAIVLSGINRIVYAYEDVMGGGTGCDLTGLPPLYRDAPLTLVAGVRRRASLNLFRRFFTDPENGYWAGSLLSRYTLNQTKDSHRL

SEQ ID NO: 142 - protein, 156 aa, synthetic construct
  REGION 1..156: note = pYY-BEM4.33; tr|A0A0G0RBB8|A0A0G0RBB8_9BACT polypeptide sequence
MQSVQYNKLTHLQRRALDEAEQVLENSYNPYSHFYVGACLISEDEQLIAGTNFENAAYGSAICAERAAVLRANAMSIRRFRGIAIIARGEDFNTTEVTGPCGSCRQVLYEISQVSGCDLQVILATSKKDKIVITTIRELLPLAFGPLDLGVDIGKY

SEQ ID NO: 143 - protein, 217 aa, synthetic construct
  REGION 1..217: note = pYY-BEM4.34; tr|A0A327L2Q5|A0A327L2Q5_9RHIZ polypeptide sequence
MVTSRDGEDEAMMARCVALSRIAVGKGEYPFGAVVAREGRIVAEAINRTIRDGDVSRHAEVIALARAQKAIGRRELRECSLYSNVEPCAMCSYCIREAWVGRVVYALGSPVMGGVSKWNILRDDGLSGRMPQVFDAAPEVVSGVLVEQAQAAWRDWSPLAWEMITLRGLMTDPSARPECRTRAARPRSLWHHLVALIERPPRPYVDPTSAAEGHADL

SEQ ID NO: 144 - protein, 162 aa, synthetic construct
  REGION 1..162: note = pYY-BEM4.35; tr|S2DR30|S2DR30_9BACT polypeptide sequence
MKMKKKIEITVSLEVIQKSEWSKEDRSLIERAIHAVEHAHAPYSNFMVGTALLLDNGQIFSANNQENVSFPVGICAERAVLSYAMGNFPNNRPVKLAVVAKRRSDSTWATVTPCGLCRQTINEYEVKFGHPIEILMLNPGEEILKASGIDQLLPFRFNDLNS

SEQ ID NO: 145 - protein, 153 aa, synthetic construct
  REGION 1..153: note = pYY-BEM4.36; tr|A0A369QGF1|A0A369QGF1_9BACT polypeptide sequence
MEEHEKWMHWCLNLAQQALQQGDFPVGAVVVQKGKLIGQGVEAGQLKKDITCHAEMEAIRDARQTINTADLQNCILYSTHEPCIMCSYVIRHHKISRVVVGTTVPEVGGSSSAYPLLSAPDISIWVAPPHLVTGVLAEACQALSQAYKQKFKK

SEQ ID NO: 146 - protein, 159 aa, synthetic construct
  REGION 1..159: note = pYY-BEM4.37; tr|A0A1W6X4U4|A0A1W6X4U4_9RHIZ polypeptide sequence
MTNPSRQERWDRRFLELAKVFGTWSKDRSAGTGCVIVGPDRLLRASGYNGFARGIDDEVPERHERPAKYSWTEHAERNAIYNAAKLGISLDGCTAYVNWFPCIDCARAIVQAGIVRLVGLHPDHADQRWGSEFKFATEMLRESGIEIILYDIPELAARK

SEQ ID NO: 147 - protein, 490 aa, synthetic construct
  REGION 1..490: note = pYY-BEM4.38; tr|A0A238BW09|A0A238BW09_9BILA polypeptide sequence
MEEMARKIRTKAKKANSYCNTMTFLISKASIVLLKAECKRIELTVVIFRFLIKMNASEPNNELCDMTVIKSMLKITHVIFDLDGLLIDTEVVFSKVNQCLLSKYNKKFTPHLRGLVTGMPKKAAVTYILEHEKLSAKVDVDEYCKKYDEMAEEMLPKCSLMPGVMKLVRHLKTHSIPMAICTGATKKEFEIKTRYHKELLDLISLRVLSGDDPAVKRGKPAPDPFLVTMDRFKQKPEKAENVLVFEDAANGVCAAIAAGMNVIMVPDLTYMKIPEGLQNKINSFSDNLIISNDLNVALMSLKKELSEEEVHFLNRAFEIAVDAVLNNEVPVGCVFVFEGQEVAFGRNDVNRTKNPTYHAEMVALKMMKQWCMDNGRDLEEIMRRTTLYVTLEPCIMCASALYHLRLKKILYGAANERFGGLVSVGTREKYGAKHFIEIMPNLSVDRAVKLLKEFYEKQNPFCPEEKRKVKKPKKSGNNNDNSDDAVALNV

SEQ ID NO: 148 - protein, 159 aa, synthetic construct
  REGION 1..159: note = pYY-BEM4.39; tr|A0A1J5H6Z0|A0A1J5H6Z0_9BACT polypeptide sequence
MAYQPSEKFMQMAIDKTREGVLSGQTPFGACIVKDGKVVACEHNTVWQDTDITSHGEVHTIRAACKAIGSIDLSGCILYSTCEPCPMCFSAIHWARIDTVVYGAFIADAQDAGFNELTISNEKMKEFGGSPVNFISGFMRDENVALFKLWKEQGANNVY

SEQ ID NO: 149 - protein, 168 aa, synthetic construct
  REGION 1..168: note = pYY-BEM4.40; tr|A0A3C2D945|A0A3C2D945_9BACT polypeptide sequence
MKTTEIRIIVHEYQNIDELTENDQYLLHEARRITEFAYAPYSGFHVGAAILLGNGMIVKGNNQENSAYPSGLCAERVALFYANANYPDSEVKTIAISAAKNGILVNDPIKPCGGCRQTLSEAEVRFGSPIRIILDGQDSILVLHGVESLLPLSFSKKDLASPLAATGR

SEQ ID NO: 150 - protein, 214 aa, synthetic construct
  REGION 1..214: note = pYY-BEM4.41; tr|A0A1I7EYS3|A0A1I7EYS3_9BURK polypeptide sequence
MKFKLDPSRPPDEDDYYLGVALAVRRKANCTGNRVAAVIVKNKRVIATGYNGVPEDMPNCLDGGCLRCSNPGGQFKSGTRYDLCICVHAEQNALLTAARFGISVEGAHLYTTMQPCFGCAKEILQAKIEKVFYLHPWVPTDVDPVMDAAMKAEYAKIIGKLKVKKLDFDDPVATWAVTTMRQAALASDKNPDKKTPPKTAKKKVAKKKSRTSPR

SEQ ID NO: 151 - protein, 155 aa, synthetic construct
  REGION 1..155: note = pYY-BEM4.42; tr|H8GQX8|H8GQX8_METAL polypeptide sequence
MNHEHFMRRAIELARQAPQYPFGAVIVRRDDGQCVGQGFNRSDLNPTYHGEMVAINDCAVRHCAEDWRGFDLYTTAEPCAMCQGAIEWAGIGRVFYGTSIPYLQKLGWWQIDLRAAEVSARAVFRDTLIVGGILETECNALFAAARRGCFGTGSE

SEQ ID NO: 152 - protein, 156 aa, synthetic construct
  REGION 1..156: note = pYY-BEM4.43; tr|A0A0S8HZN3|A0A0S8HZN3_9CHLR polypeptide sequence
MDEHDIRFLRASFDVARNARKNGNHPFGALLVDEHGRIVMEAENTVITAKDCTGHAETNLMREASSKYDSDFLANCTIYTSTEPCPMCAGAIFWSNVRRVVYGLSEESLYEIAGRGSEEVLFLSCREIFERGKKLIEVIGPLLEDEAREVHMGFWR

SEQ ID NO: 153 - protein, 193 aa, synthetic construct
  REGION 1..193: note = pYY-BEM4.44; tr|E3SF31|E3SF31_9CAUD polypeptide sequence
MKPTTVLQIAYLVSQESKCCSWKVGAVIEKNGRIISTGYNGSPAGGVNCCEHAEEQGWLLNKPKPVLIPGHKSECVRFSQVDRFVLAKAHREAHSAWSKNNEIHAELNAILFAARMGSSIEGATMYVTLSPCPDCAKAISQSGIKKLVYCETYDKNIPGWDDILKNAGIEVFNVPKRSLDKLNWENINEFCGE

SEQ ID NO: 154 - protein, 330 aa, synthetic construct
  REGION 1..330: note = pYY-BEM4.45; tr|F8AAC6|F8AAC6_THEID polypeptide sequence
MIRAPWHEYFMLLAKIVALRSGCNSRPSGAVIVKNKRILATGYNGPMPGAWHCTDRGPGYCFRREKGIPDIDKYNFCRATHAEANAIAQAARFGISVEGASLYCTLAPCYVCLKLIASAGIKKVYYEHDYGSRDFERDQFWKEAIKEAGLEKFEQITVSQEVMEQLQEILPYPTSKRRLAPTEFLDEFEDGKKYGVPSIEVLFNKLNYLTRQALKDITFVIEKTTVTEEPEGISFYLSGKMVELSELINTVKKQINADQNFYFLAKHNAIEAKIEILREAENIRLKAFLNECPLESFKRIAESLDYILYQVSNSLSLPTRLELSVNLLRI

SEQ ID NO: 155 - protein, 158 aa, synthetic construct
  REGION 1..158: note = pYY-BEM4.46; tr|A0A2H4ZNK4|A0A2H4ZNK4_9EUKA polypeptide sequence
MKKQLSRKIQEEWMSRLLRNAYDAGTYGEVPIAAVILNESGQCIGWGRNCREKDQNPLGHAEIIALRQASYLKKSWRFNECTMLVTLEPCPMCAGALLQARINHIIYGASDYKRGGFGGVLDLSKNSSAHHKIEITRGVKSIQSCQLLETWFRRRRRV

SEQ ID NO: 156 - protein, 176 aa, synthetic construct
  REGION 1..176: note = pYY-BEM4.47; tr|A0A239N5N1|A0A239N5N1_9PSED polypeptide sequence
MEGRAGIIPFDEGGAAMGPAEEDSPMQHLAYMREALALARANVEAGGRPFGAVLVRDGEVIARAANGTHLDHDPTAHAELLALRAAGRALGSPRLDGCVVYASGHPCPMCLAAMHLSGVSAAYYAYSNADGEPYGLSTAAVYAQMAQPVEWQSLPLQALRPEDEEGLYGFWRERRP

SEQ ID NO: 157 - protein, 199 aa, synthetic construct
  REGION 1..199: note = pYY-BEM4.48; tr|A0A328VTR2|A0A328VTR2_9PSED polypeptide sequence
MHPEHLALLQQAPASTHADDTWARLCCEQALLAVEEGCYAVGALLVDGAGELLCSGRNQVFAPAYASAAHAEMRVLDQLEAEHAQVDRRSLTLYVSLEPCLMCYGRILLAGITRVRYLARDRDGGFALRHGRLPPAWANLASGLSVVQAKADPYWLDLAEHAIGRLQDRQTLRQRVIRAWRGQRTLTDEFSSTKRTHSG

SEQ ID NO: 158 - protein, 402 aa, synthetic construct
  REGION 1..402: note = pYY-BEM4.49; tr|A0A103YG48|A0A103YG48_CYNCS polypeptide sequence
YIRELHASSLRRDEHEIQNPKILVIVDRLSSPSLHVSLSLSLSLVIFPPFIPLNQTPTHMENAKVVEAKDGTIAVASAFSGHQEVVQDRDHKFLTRAVEEAYKGVECGDGGPFGAVVVHKDEVVASCHNMVLKHTDPTAHAEVTAIREACKKLNKIELSDCEIYASCEPCPMCFGAIHLSRIKRLIYGAKAEAAIAIGFDDFIADALRGTGFYQKAHLEIKQADGNGAMIAEQVFEKTKAKFAIDHKFLTRAVEEAYKGVECGDGRPFGALVVHKDEVVVSCHNMVLNYTDPTAHAEITAIREACKKLNRIELSDCEMYSSCEPCPMCFGAIQISRIKRLVYGAKAEASIASGIPIGDFISDALKGTGFHEKANFEIKQADGNGAMIAEQVFERTKAMFPKR

SEQ ID NO: 159 - protein, 195 aa, synthetic construct
  REGION 1..195: note = pYY-BEM4.50; tr|W5M1M8|W5M1M8_LEPOC polypeptide sequence
NSSTRESRVMAQMEINGGASPPKKPGKGQSAADQDMITGLINKALQAKEFAYCPYSNFRVGAALMTNDGRVFTGCNVENACYNLGVCAERTAILKAVSEGYESFRAIAVSSDLQDQFISPCGACRQVMREFGTGWDVFLTKVDGSYVRMTVDELLPMSFGPDDLKKKKVFSLQNGHEVSTQFYTHSPCEAGENNN

SEQ ID NO: 160 - protein, 134 aa, synthetic construct
  REGION 1..134: note = pYY-BEM4.51; tr|A0A3N5YPZ2|A0A3N5YPZ2_9ALTE polypeptide sequence
MSNSETEHIQALVDAAQAAQKQSYSPYSSFQVGAAIFADDGNTYSGCNIENVAYPLGQCAEATAIGMMIMQGAKRIEDIMIASPNDQVCPPCGGCRQKISEFGTAETKIHMVTRSGEVSTVTLGELLPLAFDSL

SEQ ID NO: 161 - protein, 162 aa, synthetic construct
  REGION 1..162: note = pYY-BEM4.52; tr|A0A2A9NC86|A0A2A9NC86_9AGAR polypeptide sequence
MTNSTLSNEDRTRLIQGAFQARKKTYSPYSNFPVGAALLTTDGRIIEGANIENASYGGTICAERTAIVKAVSDGYRHFAGIAVTTKMPTRVSPCGICRQVLREFCSLDMPVLLVPGDYPQRNPVDDDGADKPGVITEGGVRETTLGALLPDSFGPENLPPRA

SEQ ID NO: 162 - protein, 163 aa, synthetic construct
  REGION 1..163: note = pYY-BEM4.53; tr|A0A2D6RD43|A0A2D6RD43_9GAMM polypeptide sequence
MNIENLITENDETLIRRCIELAGESVKNGDKPFGALLAKDGNIIFESSNNAKTKVPYHAEILTLMDAQDKLNTTDLSDYALYSNCEPCPMCSFMIREYKLDKVVFSVHSPYMGGQSRWNILEDDVLTRFKPYFSKPPNVVGGVLESEGKRIFDKVGLWMFGKE

SEQ ID NO: 163 - protein, 204 aa, synthetic construct
  REGION 1..204: note = pYY-BEM4.54; tr|A0A0H3AVL6|A0A0H3AVL6_BRUO2 polypeptide sequence
MHAKGYSQQERRIIPFANRFRFRELCSNKSLHGLRAKFPEQYTKWDPMRKAASITKANSATPMDIALEEAHAAGERGEVPIGAVIVRDGEIIARAGNRTREFNDVTAHAEILTIRQAGEMLGSERLIDCDLYVTLEPCAMCAAAISFARIRRLYYGASDPKGGGIEHGGRFYTQPTCHHAPEIYPGFCEADARKILKDFFREKR

SEQ ID NO: 164 - protein, 165 aa, synthetic construct
  REGION 1..165: note = pYY-BEM4.55; tr|A0A242H531|A0A242H531_9ENTE polypeptide sequence
MFIVKNNIEVIQQQAELDAKFMKQALKLAKDASNNGNEPFGAVLVKNDKVILTGENQIHTESDPTYHAELGIIRDFCTSQKITDLSEYTLYTSCEPCCMCAGAMVWSNLDRMVYGLGHDELAEIAGFNIMIGSEEIFSKSPNRPEVAKGVLKEAAVPVYVDYFQR

SEQ ID NO: 165 - protein, 181 aa, synthetic construct
  REGION 1..181: note = pYY-BEM4.56; tr|A0A2R6XZE2|A0A2R6XZE2_9BACL polypeptide sequence
MSGRISWHEYFMAQAKLIALRATCTRLMVGAVIVRDRRVIAGGYNGSIAGDEHCIDVGCKVRDGHCIRTIHAEQNALMQCAKFGVSTDGAELYVTHFPCLNCTKLLIQAGIRHIYYEVPYRVDPYAIELLEKAGVGTTQITVDLNAYVQVMSKVSTDPALTYVPESKAQKDEYGQSVGKIV

SEQ ID NO: 166 - protein, 173 aa, synthetic construct
  REGION 1..173: note = pYY-BEM4.57; tr|A0A139SHT6|A0A139SHT6_9BACT polypeptide sequence
MSEANASSESLPSRNSPVELIAEAAGKFGRRPTWDEYFMATAVLISTRSSCERLNVGCVIVTAGESHKNRIVAAGYNGHLPGSPHTSRMRDGHEQATVHAEQNAISDAARRGSSVEGCTAYVTHYPCINCAKILASAGIAKICYRLDYHNDPLVKPMLAEAGIEIVQLGEAAS

SEQ ID NO: 167 - protein, 170 aa, synthetic construct
  REGION 1..170: note = pYY-BEM4.58; tr|A0A261DBH2|A0A261DBH2_9RICK polypeptide sequence
MVMKKKLITVKRSTEFNNFFMEEALKQAQFALDKNEIPVGAIIVNRITNKVIAKAHNIVEQTKNPVLHAEIVAINQSCQILSSKNLSDCDMYVTLEPCVMCSGAISFARIGRLFYAANDPKQGAIENGGRFFNSKSCFYRPEIYSGFSAKISENLIKEFFYNVRYQKCNP

SEQ ID NO: 168 - protein, 146 aa, synthetic construct
  REGION 1..146: note = pYY-BEM4.59; tr|A0A2N0XZK6|A0A2N0XZK6_9VIBR polypeptide sequence
MTDNSLHESYMRQAFELSKSALPGCRPNPPVGCVFVKDGEVVSSGFSQPPGNHHAEAGAIAAYTGSYDGLVAYVTLEPCSFQGRTPSCAKALVRVRPEKVYVAILDPDTRNSGAGIKILEDAGIDVEVGLLGEEVASFLNPYLIRN

SEQ ID NO: 169 - protein, 159 aa, synthetic construct
  REGION 1..159: note = pYY-BEM4.60; tr|A0A1V5R0F9|A0A1V5R0F9_9BACT polypeptide sequence
MTKKETTKLHALDDFCMKKALLLAKRAFRADEVPVGALVVDSSNKVIGRGYNQVEKRKSQRAHAEQLAIEQACKKIGDWRLEGCTLYVTLEPCTMCMGLIKLSRIERVVFGAASPLFGYQLDKNRKSQLYKKGVIKIRKGVGKATAAALLKDFFKNKRM

SEQ ID NO: 170 - protein, 167 aa, synthetic construct
  REGION 1..167: note = pYY-BEM4.61; tr|A0A2W0H8Y3|A0A2W0H8Y3_9BACI polypeptide sequence
MKNNGRLDHEYFMTEALQEAKEAGQRGDLPIGAVIVHNGRIIARGSNMRKTAGIKISHAENNAMHNCAPYLMKHASECVIYTTLEPCIMCLTTLVMANIDSIVFAADDKYMNMKPFIDANSYIRDRIHQYKGGVCRGESEALLRKYSPYAAELALNGTHPHHRKGGA

SEQ ID NO: 171 - protein, 165 aa, synthetic construct
  REGION 1..165: note = pYY-BEM4.62; tr|A0A261BDB7|A0A261BDB7_CAERE polypeptide sequence
LYKLYIFRMTTTKANLTQFEQELVDKAVGAMEKAYCKYSGFKVGAALVCEDGEIIIGANHENASYGATICAERSAMVTALTKGHRKFKLLAVATELEAPCSPCGICRQYLIEFGDYKVILGSSTSDQIIETTTYGLLPYAFTPKSLDDHEKEAEERNHQEGEKKH

SEQ ID NO: 172 - protein, 162 aa, synthetic construct
  REGION 1..162: note = pYY-BEM4.63; tr|A0A2E1PHI6|A0A2E1PHI6_9GAMM polypeptide sequence
MKELLIHSWLMLNSNSKLIMERVIELSEINLKNGKIPIAAVIVDKKNYEIISESQNEDSPIGHAELLAITKALKKLNTNRLDSTNLFVTIEPCPMCAYAISKCHINRLYFGSEDEKGGGVINGPRIFESHNLKKIDYVSHCYHEKTTQLMQSFFQLKRNQQL

SEQ ID NO: 173 - protein, 133 aa, synthetic construct
  REGION 1..133: note = pYY-BEM4.64; tr|A0A378LUA7|A0A378LUA7_9GAMM polypeptide sequence
MDTIIKKMISNAHNTLAHSYSPYSKFSVASCICTDKDNFYTGVNVENSAYGLAICAETSAISAMVTAGEKRIKSMVVMAGTNILCSPCGACRQRIYEFSTPDTLIHLCDKNSILRTFKINELLPEAFKFDFNP

SEQ ID NO: 174 - protein, 370 aa, synthetic construct
  REGION 1..370: note = pYY-BEM4.65; tr|A0A139HQ78|A0A139HQ78_9PEZI polypeptide sequence
MADSLKSKPGHARHDTALIHGLSQSDVQKLSESCVDAKSKAYCPYSHFRVGCAVLLANGDVVQGANVENAAYPVGTCAERVALGTAVGAKKGDFRALAVSTDISPPASPCGMCRQFIREFCELNTPILMYDKDGKSVVMTLEQLLPMSFGPDKLLPPGQLENGLMQTQTQSSFVTRAFSTTSSRRQDDTPQVPQSHYDFFPQTFPQGPPPKTSFSPDLKQLRKEFLQLQAKAHPDLAPQDQKRRAEALSMRINEAYKTLQSPLRRAQYLLSQQGIDVEDETAKLDDSSLLMEVMEAREAVEEVEDEEQLNEIRAENNGRIEESVRVLEDAFRDNEFEKAAQEAIRLRYWVNIEESIQGWEKGNGGGILHH

SEQ ID NO: 175 - protein, 165 aa, synthetic construct
  REGION 1..165: note = pYY-BEM4.66; tr|A0A2A9FXV0|A0A2A9FXV0_9VIBR polypeptide sequence
MCNLKENKDMDKYFHFACDATIEGMREGTGGPFGATLTRNGEVVCSVANTVLKDMDISGHAEMVAVREACKKLDTLDLSDCVMYATCEPCPMCVSVMLWAGIKTCYYASTHLDAAKHGFSDQQLRDYLDGSDTSTLNMVHIEDNRDDCAKIWTEFRHLNETKNDG

SEQ ID NO: 176 - protein, 509 aa, synthetic construct
  REGION 1..509: note = pYY-BEM4.67; tr|A0A1A8AG96|A0A1A8AG96_NOTFU polypeptide sequence
MEHSDRWSRAEPGLSTSSRETRDGSTQTDCKLQGHGPRLSKVNLFTLLSLWMELFPQEQDEENGQSQIRRSGLVVVREGKVVGLHCSGADLHAGQAAILQHGASLANCQLFFSRRPCATCLKMIINAGVRQITFWPGDPEISMLTSNQTHSQRTSQSITEASLDATAVEKLKSNSRPQICVLMQPLAPGVLQFVDETSRRSDFMERMMDDDPELDSEKLFNSDRLRHLKDFCRHFLIQTDQRHKDILSQMGLKNFCVEPYFSNLRSNMTELVEVLAAVAAGMPQQHYGFYREESLSLDPHPVDVSQAVARHCIVQARLLSYRTEDPKVGVGAVIWAKGQSACCCGTGRLYLIGCGYNAYPAGSKYAEYPQMDNKQEDRERRKYRYIVHAEQNALTFRTRDIKPDECSMLFVTKCPCDECIPLIRGAGVKHIYTSDQDRDKDKGDISYLRFGSLKGVCKFIWQRSPPVSSASSLHLTNGCVGKHVRQAEQQIYKNKKLCTKGSSGSSDIC

SEQ ID NO: 177 - protein, 148 aa, synthetic construct
  REGION 1..148: note = pYY-BEM4.68; tr|A0A3E2VN88|A0A3E2VN88_9FIRM polypeptide sequence
MEKEITNMDKQKLIQMAVDGLGRSYAPYSHFHVSAALLCADGTVYTGNNIENAAYTPSVCAERCAIFKAVGDGRREFEAIAVCGGPDGVIEDYCPPCGVCRQVMREFCDPSSFRVLVAKTAEDYREYTLEQLLPDGFGPDHLTGSGER

SEQ ID NO: 178 - protein, 221 aa, synthetic construct
  REGION 1..221: note = pYY-BEM4.69; tr|A0A2D5ZRJ2|A0A2D5ZRJ2_9BACT polypeptide sequence
MARPVHLHTGERRTEEGATESRAVAAVATAITRAPRAPPRPATGRERDGPPPRRVFGGGLRVGDPSGYDRGESKPIGGPLTEKRSDWHSYFMRIAGEVATRATCDRKHVGAVIVRNRTILSTGYNGSIRGMPHCDDVGHDMVDGHCIATIHAEANAILQAARNGVMIQDGSIYITASPCWNCFKLVANAGLKRVYYGEFYRDKRSFEVARRLGIDLMHIEV

SEQ ID NO: 179 - protein, 155 aa, synthetic construct
  REGION 1..155: note = pYY-BEM4.70; tr|A0A1B8WPS3|A0A1B8WPS3_9BACI polypeptide sequence
MEGVQLIYQFQWGNLIMTVNKEDLYLIDVARNTIKTLYVDGKHHVGAAVRTKTGKIYSAVHLEANIGRVSVCAEAIALGKAISEGESEFDTIVAVRHPDPTQENQKIEVVSPCGICRELISDYGKGTNVILKNKEGYIKTVISDLLPNKYIREDN

SEQ ID NO: 180 - protein, 156 aa, synthetic construct
  REGION 1..156: note = pYY-BEM4.71; tr|A0A1W5ZQK9|A0A1W5ZQK9_9BACI polypeptide sequence
MNRFMERAVSLAAENVRVGGQPFGAVLVKDDELVAEGVNEMHLNYDVSGHAELLAIRRAQGELQTHDLSGYTMYASGEPCPMCLSAMYFAGIKDVFYCATVEEAAQVGLEKSKNVYDDLQKSKGERSLVMKQMPLEDDQEDPMKLWDERTNHNGTS

SEQ ID NO: 181 - protein, 340 aa, synthetic construct
  REGION 1..340: note = pYY-BEM4.72; tr|A0A378V0W4|A0A378V0W4_MYCFO polypeptide sequence
MVHAQFDPTARQALAATAVEAKTRKDLTWQQIADAAELSPAFVTAAVLGQHALPARSAEAVAALLGLDDDAALLLQTIPIRGSIPGGIPTDPTIYRFYEMLQVYGTTLKALVHEQFGDGIISAINFKLDVRKVADPEGGERAVITLDGKYLPPNPFDRVRYRGGLMDFAQRTIDIARQNVAEGGRPFATVIVKNGEILAESPNLVAQTHDPTAHAEILAIRKACTRIGTEHLIGATIYVLAQPCPMCLGSLYYCSPDEVVFLTTRDAYEPHYVDDRKYFELNMFYDEFAKPWDQRRLPMRYEPRDAAVDVYKLWQERNGGERRVPGAPTSTRPGKNPRGE

SEQ ID NO: 182 - protein, 157 aa, synthetic construct
  REGION 1..157: note = pYY-BEM4.73; tr|I3XF03|I3XF03_RHIFR polypeptide sequence
MKQRCMSPKSAQRFWDNDMHNNKDRPMSENELFVAAREAMAKAHAPYSKFPVGAAIRAEDGQIYTGANIENLSFPEGWCAETTAISHMVMAGQRKIMEVAVIAEKLALCPPCGGCRQRLAEFSGASTRIYLCDETGIKKSLALSDLLPHSFETEILG

SEQ ID NO: 183 - protein, 595 aa, synthetic construct
  REGION 1..595: note = pYY-BEM4.74; tr|F8IEF3|F8IEF3_ALIAT polypeptide sequence
MDAKELETRGWLCMRAVDVIDKKRRGEALAEEELRFLIEGYVAGRIPDYQMSAFLMAVVWRGMTREETLVLTRLLADSGERLDLSGIPGVKVDKHSTGGVGDKATLVVLPLVASIGVPVIKMSGRGLGHTGGTIDKLESIPGFRTDLSVAELVAQVRQVGIALGGQTADLAPADKKLYALRDVTGTVESLPLIASSVMSKKLAGGADAIVLDVKVGDGAFMKSRSDARRLARLMVEIGEAAGRRTVAVLSNMDQPLGCAIGNALEVAEAIRVLSGEGPFDLAEIALALAEEMTVLAGVAATREEARRMLRQSVAEGRALETLRRWIAAQGGDPAVVDDPSRLPQAPVQMPYLPKKAGFVAKLSALAFGLAAMRLGAGRETKEEAIDPSVGIVLHAKVGDRVQTHRPMFTVHARTGEDALRCIQELEAAIQISDDPVEAPPLILARIDRSEALPYADLMDAAREARDRAYVPYSGFAVGAALELADGRMVTGANVENASYGLTNCAERSAVFRAVAEGGPGTKPEIRAVAVIADSPEPVSPCGACRQVLAEFCSPDTPVYLGNLQGDVRETTVGALLPGAFTDAQMANVRRQDKEA

SEQ ID NO: 184 - protein, 153 aa, synthetic construct
  REGION 1..153: note = pYY-BEM4.75; tr|A0A1G3M638|A0A1G3M638_9SPIR polypeptide sequence
MKTTNINALDKWDLRFLQMAEHVAEWSKDPSTKVGAVIVRPDRTIASVGFNGFARGVRDTVERLWNRELKYPLTVHAELNAILSAHEPVRGHSLYVSPLSPCSNCAGVIIQSGIARVVAKCGQVNNPAQWSESFNLALTAFAEAGVSVILVEH

SEQ ID NO: 185 - protein, 177 aa, synthetic construct
  REGION 1..177: note = pYY-BEM4.76; tr|A0A3D9LFR2|A0A3D9LFR2_9MICC polypeptide sequence
MEQNDHGSSGAFSDPFEDDIPLTASLPRITGTGSGIDWQRLESTARAAMTRAYVPYSRFPVGAAALVEDGRVVAGCNIENASLGLTLCAECSLVSNLQMSGGGRIVAFYCVDGNGEVLMPCGRCRQLLYEFHAPGMRLMGPDGELTMDEVLPLAFGPADMTHLSDSAASTDDPGRTR

SEQ ID NO: 186 - protein, 172 aa, synthetic construct
  REGION 1..172: note = pYY-BEM4.77; tr|A0A3B9YGB5|A0A3B9YGB5_9BACT polypeptide sequence
MAKPISKKYRKLIETAKAARKKAYSPYSRYQVGAAVLTESGRIYSGANMENASYGLCMCAERVAIANAVTRGEKVLQAVCVVGKKARPCGACRQVMLEFSTKETELLMVDIDPNARRDTVIRTRVYSMLPNPFDPFESGMLPQHPQNLLRRRKSPQPRRKRRSRPVHREVSR

SEQ ID NO: 187 - protein, 391 aa, synthetic construct
  REGION 1..391: note = pYY-BEM4.78; tr|A0A182F569|A0A182F569_ANOAL polypeptide sequence
MPRPSQFRVSSSQSLSNSQIQASQSSDSVVDITSYVNAVVKALLNLSCTKTIIKRADLVNIALKGNGRLIGRVLQDANIELKEIYGYELIEVEKSKTMILCSTLAAGSMDELNDANRRRYTFLYLILGYIFMKNGSVPETIVWEFLETLGIEEQQEHNYFGDVRKLYDSLFKQAYLTRTKQALEGLNDDVMLISWGVRSKHEVSKKDILAGFCKVMNRDPVDFKAQYIEANEKDDKMNNNINGTVDGRNTVEYSSLDASVKELIEAAIKVRNNAYCPYSNFAVGAALRTVGGDIVTGCNVENGTFGPSVCAERTAVCKAVSEGHREFTAVAVVAFQETEFTAPCGTCRQTLSEFSRKDIPIYLVKPSPVRVMVTSLFQLLPHAFSPSFLNK

SEQ ID NO: 188 - protein, 151 aa, synthetic construct
  REGION 1..151: note = pYY-BEM4.79; tr|A0A264Z0D4|A0A264Z0D4_9BACI polypeptide sequence
MEPKKLIEEAIVASKQAYVQYSNFHVGAALLTKDGKLYHGCNIENASYGLTNCAERTAIFKAVSEGEKEFQAIAVVGDTEGPISPCGACRQVLAEFFSPDTVVILANLKGDHVVTNINELLPGFFSSKDLQKKVKNCFEKNALGSSCLRPI

SEQ ID NO: 189 - protein, 229 aa, synthetic construct
  REGION 1..229: note = pYY-BEM4.80; tr|A0A1L9Q1R3|A0A1L9Q1R3_ASPVE polypeptide sequence
MPLSAEEAALVETATATINSIPLSEDYSVASAAKASDGRVFTGVNVYHFTGGPCAELVVLGVAAAAGAAQLTHIVAVANEQRGILSPCGRCRQVLLDLQPNIQVIVGKEGSEQSVPVAQLLPFSYRQPDQHTPVIFKALTSSGPVVVDFFATWCGPCKAVAPVVGKLSETYTDVRFIQVDVDKARSISQEHDIRAMPTFVLYKDGKLLDKRVVGGNMKELEEQIKAIIA

SEQ ID NO: 190 - protein, 18 aa, synthetic construct
  REGION 1..18: note = synthetic peptide
KRTADGSEFESPKKKRKV

SEQ ID NO: 191 - protein, 16 aa, synthetic construct
  REGION 1..16: note = synthetic peptide
KRPAATKKAGQAKKKK

SEQ ID NO: 192 - protein, 17 aa, synthetic construct
  REGION 1..17: note = synthetic peptide
KKTELQTTNAENKTKKL

SEQ ID NO: 193 - protein, 19 aa, synthetic construct
  REGION 1..19: note = synthetic peptide
KRGINDRNFWRGENGRKTR

SEQ ID NO: 194 - protein, 16 aa, synthetic construct
  REGION 1..16: note = synthetic peptide
RKSGKIAAIVVKRPRK

SEQ ID NO: 195 - protein, 7 aa, synthetic construct
  REGION 1..7: note = synthetic peptide
PKKKRKV

SEQ ID NO: 196 - protein, 30 aa, synthetic construct
  REGION 1..30: note = synthetic polypeptide
MDSLLMNRRKFLYQFKNVRWAKGRRETYLC

SEQ ID NO: 197 - protein, 1368 aa, Streptococcus pyogenes [sequence omitted]

SEQ ID NO: 198 - DNA, 4104 bp, Streptococcus pyogenes
  misc_feature 1..4104: note = wild type spCas9 polynucleotide sequence
  source 1..4104: mol_type = genomic DNA
atggataagaaatactcaataggcttagatatcggcacaaatagcgtcggatgggcggtgatcactgatgattataaggttccgtctaaaaagttcaaggttctgggaaatacagaccgccacagtatcaaaaaaaatcttataggggctcttttatttggcagtggagagacagcggaagcgactcgtctcaaacggacagctcgtagaaggtatacacgtcggaagaatcgtatttgttatctacaggagattttttcaaatgagatggcgaaagtagatgatagtttctttcatcgacttgaagagtcttttttggtggaagaagacaagaagcatgaacgtcatcctatttttggaaatatagtagatgaagttgcttatcatgagaaatatccaactatctatcatctgcgaaaaaaattggcagattctactgataaagcggatttgcgcttaatctatttggccttagcgcatatgattaagtttcgtggtcattttttgattgagggagatttaaatcctgataatagtgatgtggacaaactatttatccagttggtacaaatctacaatcaattatttgaagaaaaccctattaacgcaagtagagtagatgctaaagcgattctttctgcacgattgagtaaatcaagacgattagaaaatctcattgctcagctccccggtgagaagagaaatggcttgtttgggaatctcattgctttgtcattgggattgacccctaattttaaatcaaattttgatttggcagaagatgctaaattacagctttcaaaagatacttacgatgatgatttagataatttattggcgcaaattggagatcaatatgctgatttgtttttggcagctaagaatttatcagatgctattttactttcagatatcctaagagtaaatagtgaaataactaaggctcccctatcagcttcaatgattaagcgctacgatgaacatcatcaagacttgactcttttaaaagctttagttcgacaacaacttccagaaaagtataaagaaatcttttttgatcaatcaaaaaacggatatgcaggttatattgatgggggagctagccaagaagaattttataaatttatcaaaccaattttagaaaaaatggatggtactgaggaattattggtgaaactaaatcgtgaagatttgctgcgcaagcaacggacctttgacaacggctctattccccatcaaattcacttgggtgagctgcatgctattttgagaagacaagaagacttttatccatttttaaaagacaatcgtgagaagattgaaaaaatcttgacttttcgaattccttattatgttggtccattggcgcgtggcaatagtcgttttgcatggatgactcggaagtctgaagaaacaattaccccatggaattttgaagaagttgtcgataaaggtgcttcagctcaatcatttattgaacgcatgacaaactttgataaaaatcttccaaatgaaaaagtactaccaaaacatagtttgctttatgagtattttacggtttataacgaattgacaaaggtcaaatatgttactgagggaatgcgaaaaccagcatttctttcaggtgaacagaagaaagccattgttgatttactcttcaaaacaaatcgaaaagtaaccgttaagcaattaaaagaagattatttcaaaaaaatagaatgttttgatagtgttgaaatttcaggagttgaagatagatttaatgcttcattaggcgcctaccatgatttgctaaaaattattaaagataaagattttttggataatgaagaaaatgaagatatcttagaggatattgttttaacattgaccttatttgaagatagggggatgattgaggaaagacttaaaacatatgctcacctctttgatgataaggtgatgaaacagcttaaacgtcgccgttatactggttggggacgtttgtctcgaaaattgattaatggtattagggataagcaatctggcaaaacaatattagattttttgaaatcagatggttttgccaatcgcaattttatgcagctgatccatgatgatagtttgacatttaaagaagatattcaaaaagcacaggtgtctggacaaggccatagtttacatgaacagattgctaacttagctggcagtcctgctattaaaaaaggtattttacagactgtaaaaattgttgatgaactggtcaaagtaatggggcataagccagaaaatatcgttattgaaatggcacgtgaaaatcagacaactcaaaagggccagaaaaattcgcgagagcgtatgaaacgaatcgaagaaggtatcaaagaattaggaagtcagattcttaaagagcatcctgttgaaaatactcaattgcaaaatgaaaagctctatctctattatctacaaaatggaagagacatgtatgtggaccaagaattagatattaatcgtttaagtgattatgatgtcgatcacattgttccacaaagtttcattaaagacgattcaatagacaataaggtactaacgcgttctgataaaaatcgtggtaaatcggataacgttccaagtgaagaagtagtcaaaaagatgaaaaactattggagacaacttctaaacgccaagttaatcactcaacgtaagtttgataatttaacgaaagctgaacgtggaggtttgagtgaacttgataaagctggttttatcaaacgccaattggttgaaactcgccaaatcactaagcatgtggcacaaattttggatagtcgcatgaatactaaatacgatgaaaatgataaacttattcgagaggttaaagtgattaccttaaaatctaaattagtttctgacttccgaaaagatttccaattctataaagtacgtgagattaacaattaccatcatgcccatgatgcgtatctaaatgccgtcgttggaactgctttgattaagaaatatccaaaacttgaatcggagtttgtctatggtgattataaagtttatgatgttcgtaaaatgattgctaagtctgagcaagaaataggcaaagcaaccgcaaaatatttcttttactctaatatcatgaacttcttcaaaacagaaattacacttgcaaatggagagattcgcaaacgccctctaatcgaaactaatggggaaactggagaaattgtctgggataaagggcgagattttgccacagtgcgcaaagtattgtccatgccccaagtcaatattgtcaagaaaacagaagtacagacaggcggattctccaaggagtcaattttaccaaaaagaaattcggacaagcttattgctcgtaaaaaagactgggatccaaaaaaatatggtggttttgatagtccaacggtagcttattcagtcctagtggttgctaaggtggaaaaagggaaatcgaagaagttaaaatccgttaaagagttactagggatcacaattatggaaagaagttcctttgaaaaaaatccgattgactttttagaagctaaaggatataaggaagttaaaaaagacttaatcattaaactacctaaatatagtctttttgagttagaaaacggtcgtaaacggatgctggctagtgccggagaattacaaaaaggaaatgagctggctctgccaagcaaatatgtgaattttttatatttagctagtcattatgaaaagttgaagggtagtccagaagataacgaacaaaaacaattgtttgtggagcagcataagcattatttagatgagattattgagcaaatcagtgaattttctaagcgtgttattttagcagatgccaatttagataaagttcttagtgcatataacaaacatagagacaaaccaatacgtgaacaagcagaaaatattattcatttatttacgttgacgaatcttggagctcccgctgcttttaaatattttgatacaacaattgatcgtaaacgatatacgtctacaaaagaagttttagatgccactcttatccatcaatccatcactggtctttatgaaacacgcattgatttgagtcagctaggaggtgactga

SEQ ID NO: 199 - protein, 1367 aa, Streptococcus pyogenes
  REGION 1..1367: note = MISC_FEATURE - spCas9 polypeptide sequence
MDKKYSIGLDIGTNSVGWAVITDDYKVPSKKFKVLGNTDRHSIKKNLIGALLFGSGETAEATRLKRTARRRYTRRKNRICYLQEIFSNEMAKVDDSFFHRLEESFLVEEDKKHERHPIFGNIVDEVAYHEKYPTIYHLRKKLADSTDKADLRLIYLALAHMIKFRGHFLIEGDLNPDNSDVDKLFIQLVQIYNQLFEENPINASRVDAKAILSARLSKSRRLENLIAQLPGEKRNGLFGNLIALSLGLTPNFKSNFDLAEDAKLQLSKDTYDDDLDNLLAQIGDQYADLFLAAKNLSDAILLSDILRVNSEITKAPLSASMIKRYDEHHQDLTLLKALVRQQLPEKYKEIFFDQSKNGYAGYIDGGASQEEFYKFIKPILEKMDGTEELLVKLNREDLLRKQRTFDNGSIPHQIHLGELHAILRRQEDFYPFLKDNREKIEKILTFRIPYYVGPLARGNSRFAWMTRKSEETITPWNFEEVVDKGASAQSFIERMTNFDKNLPNEKVLPKHSLLYEYFTVYNELTKVKYVTEGMRKPAFLSGEQKKAIVDLLFKTNRKVTVKQLKEDYFKKIECFDSVEISGVEDRFNASLGAYHDLLKIIKDKDFLDNEENEDILEDIVLTLTLFEDRGMIEERLKTYAHLFDDKVMKQLKRRRYTGWGRLSRKLINGIRDKQSGKTILDFLKSDGFANRNFMQLIHDDSLTFKEDIQKAQVSGQGHSLHEQIANLAGSPAIKKGILQTVKIVDELVKVMGHKPENIVIEMARENQTTQKGQKNSRERMKRIEEGIKELGSQILKEHPVENTQLQNEKLYLYYLQNGRDMYVDQELDINRLSDYDVDHIVPQSFIKDDSIDNKVLTRSDKNRGKSDNVPSEEVVKKMKNYWRQLLNAKLITQRKFDNLTKAERGGLSELDKAGFIKRQLVETRQITKHVAQILDSRMNTKYDENDKLIREVKVITLKSKLVSDFRKDFQFYKVREINNYHHAHDAYLNAVVGTALIKKYPKLESEFVYGDYKVYDVRKMIAKSEQEIGKATAKYFFYSNIMNFFKTEITLANGEIRKRPLIETNGETGEIVWDKGRDFATVRKVLSMPQVNIVKKTEVQTGGFSKESILPKRNSDKLIARKKDWDPKKYGGFDSPTVAYSVLVVAKVEKGKSKKLKSVKELLGITIMERSSFEKNPIDFLEAKGYKEVKKDLIIKLPKYSLFELENGRKRMLASAGELQKGNELALPSKYVNFLYLASHYEKLKGSPEDNEQKQLFVEQHKHYLDEIIEQISEFSKRVILADANLDKVLSAYNKHRDKPIREQAENIIHLFTLTNLGAPAAFKYFDTTIDRKRYTSTKEVLDATLIHQSITGLYETRIDLSQLGGD

SEQ ID NO: 200 - DNA, 4212 bp, synthetic construct
  misc_feature 1..4212: note = wild-type Cas9 polynucleotide sequence
  misc_feature 5..58: note = RuvC domain
  misc_feature 718..764: note = RuvC domain
  misc_feature 772..901: note = HNH domain
  misc_feature 906..1101: note = RuvC domain
  source 1..4212: mol_type = other DNA
atggataaaaagtattctattggtttagacatcggcactaattccgttggatgggctgtcataaccgatgaatacaaagtaccttcaaagaaatttaaggtgttggggaacacagaccgtcattcgattaaaaagaatcttatcggtgccctcctattcgatagtggcgaaacggcagaggcgactcgcctgaaacgaaccgctcggagaaggtatacacgtcgcaagaaccgaatatgttacttacaagaaatttttagcaatgagatggccaaagttgacgattctttctttcaccgtttggaagagtccttccttgtcgaagaggacaagaaacatgaacggcaccccatctttggaaacatagtagatgaggtggcatatcatgaaaagtacccaacgatttatcacctcagaaaaaagctagttgactcaactgataaagcggacctgaggttaatctacttggctcttgcccatatgataaagttccgtgggcactttctcattgagggtgatctaaatccggacaactcggatgtcgacaaactgttcatccagttagtacaaacctataatcagttgtttgaagagaaccctataaatgcaagtggcgtggatgcgaaggctattcttagcgcccgcctctctaaatcccgacggctagaaaacctgatcgcacaattacccggagagaagaaaaatgggttgttcggtaaccttatagcgctctcactaggcctgacaccaaattttaagtcgaacttcgacttagctgaagatgccaaattgcagcttagtaaggacacgtacgatgacgatctcgacaatctactggcacaaattggagatcagtatgcggacttatttttggctgccaaaaaccttagcgatgcaatcctcctatctgacatactgagagttaatactgagattaccaaggcgccgttatccgcttcaatgatcaaaaggtacgatgaacatcaccaagacttgacacttctcaaggccctagtccgtcagcaactgcctgagaaatataaggaaatattctttgatcagtcgaaaaacgggtacgcaggttatattgacggcggagcgagtcaagaggaattctacaagtttatcaaacccatattagagaagatggatgggacggaagagttgcttgtaaaactcaatcgcgaagatctactgcgaaagcagcggactttcgacaacggtagcattccacatcaaatccacttaggcgaattgcatgctatacttagaaggcaggaggatttttatccgttcctcaaagacaatcgtgaaaagattgagaaaatcctaacctttcgcataccttactatgtgggacccctggcccgagggaactctcggttcgcatggatgacaagaaagtccgaagaaacgattactccatggaattttgaggaagttgtcgataaaggtgcgtcagctcaatcgttcatcgagaggatgaccaactttgacaagaatttaccgaacgaaaaagtattgcctaagcacagtttactttacgagtatttcacagtgtacaatgaactcacgaaagttaagtatgtcactgagggcatgcgtaaacccgcctttctaagcggagaacagaagaaagcaatagtagatctgttattcaagaccaaccgcaaagtgacagttaagcaattgaaagaggactactttaagaaaattgaatgcttcgattctgtcgagatctccggggtagaagatcgatttaatgcgtcacttggtacgtatcatgacctcctaaagataattaaagataaggacttcctggataacgaagagaatgaagatatcttagaagatatagtgttgactcttaccctctttgaagatcgggaaatgattgaggaaagactaaaaacatacgctcacctgttcgacgataaggttatgaaacagttaaagaggcgtcgctatacgggctggggacgattgtcgcggaaacttatcaacgggataagagacaagcaaagtggtaaaactattctcgattttctaaagagcgacggcttcgccaataggaactttatgcagctgatccatgatgactctttaaccttcaaagaggatatacaaaaggcacaggtttccggacaaggggactcattgcacgaacatattgcgaatcttgctggttcgccagccatcaaaaagggcatactccagacagtcaaagtagtggatgagctagttaaggtcatgggacgtcacaaaccggaaaacattgtaatcgagatggcacgcgaaaatcaaacgactcagaaggggcaaaaaaacagtcgagagcggatgaagagaatagaagagggtattaaagaactgggcagccagatcttaaaggagcatcctgtggaaaatacccaattgcagaacgagaaactttacctctattacctacaaaatggaagggacatgtatgttgatcaggaactggacataaaccgtttatctgattacgacgtcgatcacattgtaccccaatcctttttgaaggacgattcaatcgacaataaagtgcttacacgctcggataagaaccgagggaaaagtgacaatgttccaagcgaggaagtcgtaaagaaaatgaagaactattggcggcagctcctaaatgcgaaactgataacgcaaagaaagttcgataacttaactaaagctgagaggggtggcttgtctgaacttgacaaggccggatttattaaacgtcagctcgtggaaacccgccaaatcacaaagcatgttgcacagatactagattcccgaatgaatacgaaatacgacgagaacgataagctgattcgggaagtcaaagtaatcactttaaagtcaaaattggtgtcggacttcagaaaggattttcaattctataaagttagggagataaataactaccaccatgcgcacgacgcttatcttaatgccgtcgtagggaccgcactcattaagaaatacccgaagctagaaagtgagtttgtgtatggtgattacaaagtttatgacgtccgtaagatgatcgcgaaaagcgaacaggagataggcaaggctacagccaaatacttcttttattctaacattatgaatttctttaagacggaaatcactctggcaaacggagagatacgcaaacgacctttaattgaaaccaatggggagacaggtgaaatcgtatgggataagggccgggacttcgcgacggtgagaaaagttttgtccatgccccaagtcaacatagtaaagaaaactgaggtgcagaccggagggttttcaaaggaatcgattcttccaaaaaggaatagtgataagctcatcgctcgtaaaaaggactgggacccgaaaaagtacggtggcttcgatagccctacagttgcctattctgtcctagtagtggcaaaagttgagaagggaaaatccaagaaactgaagtcagtcaaagaattattggggataacgattatggagcgctcgtcttttgaaaagaaccccatcgacttccttgaggcgaaaggttacaaggaagtaaaaaaggatctcataattaaactaccaaagtatagtctgtttgagttagaaaatggccgaaaacggatgttggctagcgccggagagcttcaaaaggggaacgaactcgcactaccgtctaaatacgtgaatttcctgtatttagcgtcccattacgagaagttgaaaggttcacctgaagataacgaacagaagcaactttttgttgagcagcacaaacattatctcgacgaaatcatagagcaaatttcggaattcagtaagagagtcatcctagctgatgccaatctggacaaagtattaagcgcatacaacaagcacagggataaacccatacgtgagcaggcggaaaatattatccatttgtttactcttaccaacctcggcgctccagccgcattcaagtattttgacacaacgatagatcgcaaacgatacacttctaccaaggaggtgctagacgcgacactgattcaccaatccatcacgggattatatgaaactcggatagatttgtcacagcttgggggtgacggatcccccaagaagaagaggaaagtctcgagcgactacaaagaccatgacggtgattataaagatcatgacatcgattacaaggatgacgatgacaaggctgcagga

SEQ ID NO: 201 - protein, 1368 aa, synthetic construct
  REGION 1..1368: note = exemplary catalytically active Cas9 nickase (nCas9) polypeptide sequence
MDKKYSIGLAIGTNSVGWAVITDEYKVPSKKFKVLGNTDRHSIKKNLIGALLFDSGETAEATRLKRTARRRYTRRKNRICYLQEIFSNEMAKVDDSFFHRLEESFLVEEDKKHERHPIFGNIVDEVAYHEKYPTIYHLRKKLVDSTDKADLRLIYLALAHMIKFRGHFLIEGDLNPDNSDVDKLFIQLVQTYNQLFEENPINASGVDAKAILSARLSKSRRLENLIAQLPGEKKNGLFGNLIALSLGLTPNFKSNFDLAEDAKLQLSKDTYDDDLDNLLAQIGDQYADLFLAAKNLSDAILLSDILRVNTEITKAPLSASMIKRYDEHHQDLTLLKALVRQQLPEKYKEIFFDQSKNGYAGYIDGGASQEEFYKFIKPILEKMDGTEELLVKLNREDLLRKQRTFDNGSIPHQIHLGELHAILRRQEDFYPFLKDNREKIEKILTFRIPYYVGPLARGNSRFAWMTRKSEETITPWNFEEVVDKGASAQSFIERMTNFDKNLPNEKVLPKHSLLYEYFTVYNELTKVKYVTEGMRKPAFLSGEQKKAIVDLLFKTNRKVTVKQLKEDYFKKIECFDSVEISGVEDRFNASLGTYHDLLKIIKDKDFLDNEENEDILEDIVLTLTLFEDREMIEERLKTYAHLFDDKVMKQLKRRRYTGWGRLSRKLINGIRDKQSGKTILDFLKSDGFANRNFMQLIHDDSLTFKEDIQKAQVSGQGDSLHEHIANLAGSPAIKKGILQTVKVVDELVKVMGRHKPENIVIEMARENQTTQKGQKNSRERMKRIEEGIKELGSQILKEHPVENTQLQNEKLYLYYLQNGRDMYVDQELDINRLSDYDVDHIVPQSFLKDDSIDNKVLTRSDKNRGKSDNVPSEEVVKKMKNYWRQLLNAKLITQRKFDNLTKAERGGLSELDKAGFIKRQLVETRQITKHVAQILDSRMNTKYDENDKLIREVKVITLKSKLVSDFRKDFQFYKVREINNYHHAHDAYLNAVVGTALIKKYPKLESEFVYGDYKVYDVRKMIAKSEQEIGKATAKYFFYSNIMNFFKTEITLANGEIRKRPLIETNGETGEIVWDKGRDFATVRKVLSMPQVNIVKKTEVQTGGFSKESILPKRNSDKLIARKKDWDPKKYGGFDSPTVAYSVLVVAKVEKGKSKKLKSVKELLGITIMERSSFEKNPIDFLEAKGYKEVKKDLIIKLPKYSLFELENGRKRMLASAGELQKGNELALPSKYVNFLYLASHYEKLKGSPEDNEQKQLFVEQHKHYLDEIIEQISEFSKRVILADANLDKVLSAYNKHRDKPIREQAENIIHLFTLTNLGAPAAFKYFDTTIDRKRYTSTKEVLDATLIHQSITGLYETRIDLSQLGGD

SEQ ID NO: 202 - DNA, 4107 bp, Streptococcus pyogenes
  misc_feature 1..4107: note = Cas9 from Streptococcus pyogenes (NCBI Ref. Seq.: NC_002737.2)polynucleotide sequence
  source 1..4107: mol_type = genomic DNA
atggataagaaatactcaataggcttagatatcggcacaaatagcgtcggatgggcggtgatcactgatgaatataaggttccgtctaaaaagttcaaggttctgggaaatacagaccgccacagtatcaaaaaaaatcttataggggctcttttatttgacagtggagagacagcggaagcgactcgtctcaaacggacagctcgtagaaggtatacacgtcggaagaatcgtatttgttatctacaggagattttttcaaatgagatggcgaaagtagatgatagtttctttcatcgacttgaagagtcttttttggtggaagaagacaagaagcatgaacgtcatcctatttttggaaatatagtagatgaagttgcttatcatgagaaatatccaactatctatcatctgcgaaaaaaattggtagattctactgataaagcggatttgcgcttaatctatttggccttagcgcatatgattaagtttcgtggtcattttttgattgagggagatttaaatcctgataatagtgatgtggacaaactatttatccagttggtacaaacctacaatcaattatttgaagaaaaccctattaacgcaagtggagtagatgctaaagcgattctttctgcacgattgagtaaatcaagacgattagaaaatctcattgctcagctccccggtgagaagaaaaatggcttatttgggaatctcattgctttgtcattgggtttgacccctaattttaaatcaaattttgatttggcagaagatgctaaattacagctttcaaaagatacttacgatgatgatttagataatttattggcgcaaattggagatcaatatgctgatttgtttttggcagctaagaatttatcagatgctattttactttcagatatcctaagagtaaatactgaaataactaaggctcccctatcagcttcaatgattaaacgctacgatgaacatcatcaagacttgactcttttaaaagctttagttcgacaacaacttccagaaaagtataaagaaatcttttttgatcaatcaaaaaacggatatgcaggttatattgatgggggagctagccaagaagaattttataaatttatcaaaccaattttagaaaaaatggatggtactgaggaattattggtgaaactaaatcgtgaagatttgctgcgcaagcaacggacctttgacaacggctctattccccatcaaattcacttgggtgagctgcatgctattttgagaagacaagaagacttttatccatttttaaaagacaatcgtgagaagattgaaaaaatcttgacttttcgaattccttattatgttggtccattggcgcgtggcaatagtcgttttgcatggatgactcggaagtctgaagaaacaattaccccatggaattttgaagaagttgtcgataaaggtgcttcagctcaatcatttattgaacgcatgacaaactttgataaaaatcttccaaatgaaaaagtactaccaaaacatagtttgctttatgagtattttacggtttataacgaattgacaaaggtcaaatatgttactgaaggaatgcgaaaaccagcatttctttcaggtgaacagaagaaagccattgttgatttactcttcaaaacaaatcgaaaagtaaccgttaagcaattaaaagaagattatttcaaaaaaatagaatgttttgatagtgttgaaatttcaggagttgaagatagatttaatgcttcattaggtacctaccatgatttgctaaaaattattaaagataaagattttttggataatgaagaaaatgaagatatcttagaggatattgttttaacattgaccttatttgaagatagggagatgattgaggaaagacttaaaacatatgctcacctctttgatgataaggtgatgaaacagcttaaacgtcgccgttatactggttggggacgtttgtctcgaaaattgattaatggtattagggataagcaatctggcaaaacaatattagattttttgaaatcagatggttttgccaatcgcaattttatgcagctgatccatgatgatagtttgacatttaaagaagacattcaaaaagcacaagtgtctggacaaggcgatagtttacatgaacatattgcaaatttagctggtagccctgctattaaaaaaggtattttacagactgtaaaagttgttgatgaattggtcaaagtaatggggcggcataagccagaaaatatcgttattgaaatggcacgtgaaaatcagacaactcaaaagggccagaaaaattcgcgagagcgtatgaaacgaatcgaagaaggtatcaaagaattaggaagtcagattcttaaagagcatcctgttgaaaatactcaattgcaaaatgaaaagctctatctctattatctccaaaatggaagagacatgtatgtggaccaagaattagatattaatcgtttaagtgattatgatgtcgatcacattgttccacaaagtttccttaaagacgattcaatagacaataaggtcttaacgcgttctgataaaaatcgtggtaaatcggataacgttccaagtgaagaagtagtcaaaaagatgaaaaactattggagacaacttctaaacgccaagttaatcactcaacgtaagtttgataatttaacgaaagctgaacgtggaggtttgagtgaacttgataaagctggttttatcaaacgccaattggttgaaactcgccaaatcactaagcatgtggcacaaattttggatagtcgcatgaatactaaatacgatgaaaatgataaacttattcgagaggttaaagtgattaccttaaaatctaaattagtttctgacttccgaaaagatttccaattctataaagtacgtgagattaacaattaccatcatgcccatgatgcgtatctaaatgccgtcgttggaactgctttgattaagaaatatccaaaacttgaatcggagtttgtctatggtgattataaagtttatgatgttcgtaaaatgattgctaagtctgagcaagaaataggcaaagcaaccgcaaaatatttcttttactctaatatcatgaacttcttcaaaacagaaattacacttgcaaatggagagattcgcaaacgccctctaatcgaaactaatggggaaactggagaaattgtctgggataaagggcgagattttgccacagtgcgcaaagtattgtccatgccccaagtcaatattgtcaagaaaacagaagtacagacaggcggattctccaaggagtcaattttaccaaaaagaaattcggacaagcttattgctcgtaaaaaagactgggatccaaaaaaatatggtggttttgatagtccaacggtagcttattcagtcctagtggttgctaaggtggaaaaagggaaatcgaagaagttaaaatccgttaaagagttactagggatcacaattatggaaagaagttcctttgaaaaaaatccgattgactttttagaagctaaaggatataaggaagttaaaaaagacttaatcattaaactacctaaatatagtctttttgagttagaaaacggtcgtaaacggatgctggctagtgccggagaattacaaaaaggaaatgagctggctctgccaagcaaatatgtgaattttttatatttagctagtcattatgaaaagttgaagggtagtccagaagataacgaacaaaaacaattgtttgtggagcagcataagcattatttagatgagattattgagcaaatcagtgaattttctaagcgtgttattttagcagatgccaatttagataaagttcttagtgcatataacaaacatagagacaaaccaatacgtgaacaagcagaaaatattattcatttatttacgttgacgaatcttggagctcccgctgcttttaaatattttgatacaacaattgatcgtaaacgatatacgtctacaaaagaagttttagatgccactcttatccatcaatccatcactggtctttatgaaacacgcattgatttgagtcagctaggaggtgactga

SEQ ID NO: 203 - protein, 1368 aa, synthetic construct
  REGION 1..1368: note = catalytically inactive Cas9 (dCas9)polypeptide sequence
  REGION 5..58: note = MISC_FEATURE - RuvC domain
  REGION 718..764: note = MISC_FEATURE - RuvC domain
  REGION 773..902: note = MISC_FEATURE - HNH domain
  REGION 907..1102: note = MISC_FEATURE - RuvC domain
MDKKYSIGLAIGTNSVGWAVITDEYKVPSKKFKVLGNTDRHSIKKNLIGALLFDSGETAEATRLKRTARRRYTRRKNRICYLQEIFSNEMAKVDDSFFHRLEESFLVEEDKKHERHPIFGNIVDEVAYHEKYPTIYHLRKKLVDSTDKADLRLIYLALAHMIKFRGHFLIEGDLNPDNSDVDKLFIQLVQTYNQLFEENPINASGVDAKAILSARLSKSRRLENLIAQLPGEKKNGLFGNLIALSLGLTPNFKSNFDLAEDAKLQLSKDTYDDDLDNLLAQIGDQYADLFLAAKNLSDAILLSDILRVNTEITKAPLSASMIKRYDEHHQDLTLLKALVRQQLPEKYKEIFFDQSKNGYAGYIDGGASQEEFYKFIKPILEKMDGTEELLVKLNREDLLRKQRTFDNGSIPHQIHLGELHAILRRQEDFYPFLKDNREKIEKILTFRIPYYVGPLARGNSRFAWMTRKSEETITPWNFEEVVDKGASAQSFIERMTNFDKNLPNEKVLPKHSLLYEYFTVYNELTKVKYVTEGMRKPAFLSGEQKKAIVDLLFKTNRKVTVKQLKEDYFKKIECFDSVEISGVEDRFNASLGTYHDLLKIIKDKDFLDNEENEDILEDIVLTLTLFEDREMIEERLKTYAHLFDDKVMKQLKRRRYTGWGRLSRKLINGIRDKQSGKTILDFLKSDGFANRNFMQLIHDDSLTFKEDIQKAQVSGQGDSLHEHIANLAGSPAIKKGILQTVKVVDELVKVMGRHKPENIVIEMARENQTTQKGQKNSRERMKRIEEGIKELGSQILKEHPVENTQLQNEKLYLYYLQNGRDMYVDQELDINRLSDYDVDAIVPQSFLKDDSIDNKVLTRSDKNRGKSDNVPSEEVVKKMKNYWRQLLNAKLITQRKFDNLTKAERGGLSELDKAGFIKRQLVETRQITKHVAQILDSRMNTKYDENDKLIREVKVITLKSKLVSDFRKDFQFYKVREINNYHHAHDAYLNAVVGTALIKKYPKLESEFVYGDYKVYDVRKMIAKSEQEIGKATAKYFFYSNIMNFFKTEITLANGEIRKRPLIETNGETGEIVWDKGRDFATVRKVLSMPQVNIVKKTEVQTGGFSKESILPKRNSDKLIARKKDWDPKKYGGFDSPTVAYSVLVVAKVEKGKSKKLKSVKELLGITIMERSSFEKNPIDFLEAKGYKEVKKDLIIKLPKYSLFELENGRKRMLASAGELQKGNELALPSKYVNFLYLASHYEKLKGSPEDNEQKQLFVEQHKHYLDEIIEQISEFSKRVILADANLDKVLSAYNKHRDKPIREQAENIIHLFTLTNLGAPAAFKYFDTTIDRKRYTSTKEVLDATLIHQSITGLYETRIDLSQLGGD

SEQ ID NO: 204 - protein, 345 aa, Sulfolobus islandicus
  REGION 1..345: note = MISC_FEATURE - tr|F0NN87|F0NN87_SULIHCRISPR-associatedCasx protein OS =Sulfolobus islandicus (strain HVE10/4) GN = SiH_0402 PE=4; SV = 1);CasX polypeptide sequence
MEVPLYNIFGDNYIIQVATEAENSTIYNNKVEIDDEELRNVLNLAYKIAKNNEDAAAERRGKAKKKKGEEGETTTSNIILPLSGNDKNPWTETLKCYNFPTTVALSEVFKNFSQVKECEEVSAPSFVKPEFYEFGRSPGMVERTRRVKLEVEPHYLIIAAAGWVLTRLGKAKVSEGDYVGVNVFTPTRGILYSLIQNVNGIVPGIKPETAFGLWIARKVVSSVTNPNVSVVRIYTISDAVGQNPTTINGGFSIDLTKLLEKRYLLSERLEAIARNALSISSNMRERYIVLANYIYEYLTGSKRLEDLLYFANRDLIMNLNSDDGKVRDLKLISAYVNGELIRGEG

SEQ ID NO: 205 - protein, 345 aa, Sulfolobus islandicus
  REGION 1..345: note = MISC_FEATURE - tr|F0NH53|F0NH53_SULIR CRISPR associated protein, Casx OS =Sulfolobus islandicus (strain REY15A) GN=SiRe_0771 PE=4 SV=1);CasX polypeptide sequence
MEVPLYNIFGDNYIIQVATEAENSTIYNNKVEIDDEELRNVLNLAYKIAKNNEDAAAERRGKAKKKKGEEGETTTSNIILPLSGNDKNPWTETLKCYNFPTTVALSEVFKNFSQVKECEEVSAPSFVKPEFYKFGRSPGMVERTRRVKLEVEPHYLIMAAAGWVLTRLGKAKVSEGDYVGVNVFTPTRGILYSLIQNVNGIVPGIKPETAFGLWIARKVVSSVTNPNVSVVSIYTISDAVGQNPTTINGGFSIDLTKLLEKRDLLSERLEAIARNALSISSNMRERYIVLANYIYEYLTGSKRLEDLLYFANRDLIMNLNSDDGKVRDLKLISAYVNGELIRGEG

SEQ ID NO: 206 - protein, 987 aa, unidentified
  REGION 1..987: note = MISC_FEATURE - CasX polypeptide sequence
MEKRINKIRKKLSADNATKPVSRSGPMKTLLVRVMTDDLKKRLEKRRKKPEVMPQVISNNAANNLRMLLDDYTKMKEAILQVYWQEFKDDHVGLMCKFAQPASKKIDQNKLKPEMDEKGNLTTAGFACSQCGQPLFVYKLEQVSEKGKAYTNYFGRCNVAEHEKLILLAQLKPVKDSDEAVTYSLGKFGQRALDFYSIHVTKESTHPVKPLAQIAGNRYASGPVGKALSDACMGTIASFLSKYQDIIIEHQKVVKGNQKRLESLRELAGKENLEYPSVTLPPQPHTKEGVDFAYNEVIARVRMWVNLNLWQKLKLSRDDAKPLLRLKGFPSFPVVERRENEVDWWNTINEVKKLIDAKRDMGRVFWSGVTAEKRNTILEGYNYLPNENDHKKREGSLENPKKPAKRQFGDLLLYLEKKYAGDWGKVFDEAWERIDKKIAGLTSHIEREEARNAEDAQSKAVLTDWLRAKASFVLERLKEMDEKEFYACEIQLQKWYGDLRGNPFAVEAENRVVDISGFSIGSDGHSIQYRNLLAWKYLENGKREFYLLMNYGKKGRIRFTDGTDIKKSGKWQGLLYGGGKAKVIDLTFDPDDEQLIILPLAFGTRQGREFIWNDLLSLETGLIKLANGRVIEKTIYNKKIGRDEPALFVALTFERREVVDPSNIKPVNLIGVARGENIPAVIALTDPEGCPLPEFKDSSGGPTDILRIGEGYKEKQRAIQAAKEVEQRRAGGYSRKFASKSRNLADDMVRNSARDLFYHAVTHDAVLVFANLSRGFGRQGKRTFMTERQYTKMEDWLTAKLAYEGLTSKTYLSKTLAQYTSKTCSNCGFTITYADMDVMLVRLKKTSDGWATTLNNKELKAEYQITYYNRYKRQTVEKELSAELDRLSEESGNNDISKWTKGRRDEALFLLKKRFSHRPVQEQFVCLDCGHEVHAAEQAALNIARSWLFLNSNSTEFKSYKSGKQPFVGAWQAFYKRRLKEVWKPNA

SEQ ID NO: 207 - protein, 1210 aa, unidentified
  REGION 1..1210: note = MISC_FEATURE - APG80656.1 CRISPR-associated protein CasY [uncultured Parcubacteria group bacterium]; CasY polypeptide sequence
MSKRHPRISGVKGYRLHAQRLEYTGKSGAMRTIKYPLYSSPSGGRTVPREIVSAINDDYVGLYGLSNFDDLYNAEKRNEEKVYSVLDFWYDCVQYGAVFSYTAPGLLKNVAEVRGGSYELTKTLKGSHLYDELQIDKVIKFLNKKEISRANGSLDKLKKDIIDCFKAEYRERHKDQCNKLADDIKNAKKDAGASLGERQKKLFRDFFGISEQSENDKPSFTNPLNLTCCLLPFDTVNNNRNRGEVLFNKLKEYAQKLDKNEGSLEMWEYIGIGNSGTAFSNFLGEGFLGRLRENKITELKKAMMDITDAWRGQEQEEELEKRLRILAALTIKLREPKFDNHWGGYRSDINGKLSSWLQNYINQTVKIKEDLKGHKKDLKKAKEMINRFGESDTKEEAVVSSLLESIEKIVPDDSADDEKPDIPAIAIYRRFLSDGRLTLNRFVQREDVQEALIKERLEAEKKKKPKKRKKKSDAEDEKETIDFKELFPHLAKPLKLVPNFYGDSKRELYKKYKNAAIYTDALWKAVEKIYKSAFSSSLKNSFFDTDFDKDFFIKRLQKIFSVYRRFNTDKWKPIVKNSFAPYCDIVSLAENEVLYKPKQSRSRKSAAIDKNRVRLPSTENIAKAGIALARELSVAGFDWKDLLKKEEHEEYIDLIELHKTALALLLAVTETQLDISALDFVENGTVKDFMKTRDGNLVLEGRFLEMFSQSIVFSELRGLAGLMSRKEFITRSAIQTMNGKQAELLYIPHEFQSAKITTPKEMSRAFLDLAPAEFATSLEPESLSEKSLLKLKQMRYYPHYFGYELTRTGQGIDGGVAENALRLEKSPVKKREIKCKQYKTLGRGQNKIVLYVRSSYYQTQFLEWFLHRPKNVQTDVAVSGSFLIDEKKVKTRWNYDALTVALEPVSGSERVFVSQPFTIFPEKSAEEEGQRYLGIDIGEYGIAYTALEITGDSAKILDQNFISDPQLKTLREEVKGLKLDQRRGTFAMPSTKIARIRESLVHSLRNRIHHLALKHKAKIVYELEVSRFEEGKQKIKKVYATLKKADVYSEIDADKNLQTTVWGKLAVASEISASYTSQFCGACKKLWRAEMQVDETITTQELIGTVRVIKGGTLIDAIKDFMRPPIFDENDTPFPKYRDFCDKHHISKKMRGNSCLFICPFCRANADADIQASQTIALLRYVKEEKKVEDYFERFRKLKNIKVLGQMKKI

SEQ ID NO: 208 - protein, 1082 aa, Neisseria meningitidis
  REGION 1..1082: note = MISC_FEATURE - NCBI Reference: WP_002235162.1; type II CRISPR RNA-guided endonuclease Cas9; Nme1Cas9 polypeptide sequence
MAAFKPNPINYILGLDIGIASVGWAMVEIDEDENPICLIDLGVRVFERAEVPKTGDSLAMARRLARSVRRLTRRRAHRLLRARRLLKREGVLQAADFDENGLIKSLPNTPWQLRAAALDRKLTPLEWSAVLLHLIKHRGYLSQRKNEGETADKELGALLKGVADNAHALQTGDFRTPAELALNKFEKESGHIRNQRGDYSHTFSRKDLQAELILLFEKQKEFGNPHVSGGLKEGIETLLMTQRPALSGDAVQKMLGHCTFEPAEPKAAKNTYTAERFIWLTKLNNLRILEQGSERPLTDTERATLMDEPYRKSKLTYAQARKLLGLEDTAFFKGLRYGKDNAEASTLMEMKAYHAISRALEKEGLKDKKSPLNLSPELQDEIGTAFSLFKTDEDITGRLKDRIQPEILEALLKHISFDKFVQISLKALRRIVPLMEQGKRYDEACAEIYGDHYGKKNTEEKIYLPPIPADEIRNPVVLRALSQARKVINGVVRRYGSPARIHIETAREVGKSFKDRKEIEKRQEENRKDREKAAAKFREYFPNFVGEPKSKDILKLRLYEQQHGKCLYSGKEINLGRLNEKGYVEIDHALPFSRTWDDSFNNKVLVLGSENQNKGNQTPYEYFNGKDNSREWQEFKARVETSRFPRSKKQRILLQKFDEDGFKERNLNDTRYVNRFLCQFVADRMRLTGKGKKRVFASNGQITNLLRGFWGLRKVRAENDRHHALDAVVVACSTVAMQQKITRFVRYKEMNAFDGKTIDKETGEVLHQKTHFPQPWEFFAQEVMIRVFGKPDGKPEFEEADTPEKLRTLLAEKLSSRPEAVHEYVTPLFVSRAPNRKMSGQGHMETVKSAKRLDEGVSVLRVPLTQLKLKDLEKMVNREREPKLYEALKARLEAHKDDPAKAFAEPFYKYDKAGNRTQQVKAVRVEQVQKTGVWVRNHNGIADNATMVRVDVFEKGDKYYLVPIYSWQVAKGILPDRAVVQGKDEEDWQLIDDSFNFKFSLHPNDLVEVITKKARMFGYFASCHRGTGNINIRIHDLDHKIGKNGILEGIGVKTALSFQKYQIDELGKEIRPCRLKKRPPVR

SEQ ID NO: 209 - protein, 1082 aa, Neisseria meningitidis
  REGION 1..1082: note = MISC_FEATURE - NCBI Reference: WP_002230835; type II CRISPR RNA-guided endonuclease Cas9; Nme2Cas9 polypeptide sequence
MAAFKPNPINYILGLDIGIASVGWAMVEIDEEENPIRLIDLGVRVFERAEVPKTGDSLAMARRLARSVRRLTRRRAHRLLRARRLLKREGVLQAADFDENGLIKSLPNTPWQLRAAALDRKLTPLEWSAVLLHLIKHRGYLSQRKNEGETADKELGALLKGVANNAHALQTGDFRTPAELALNKFEKESGHIRNQRGDYSHTFSRKDLQAELILLFEKQKEFGNPHVSGGLKEGIETLLMTQRPALSGDAVQKMLGHCTFEPAEPKAAKNTYTAERFIWLTKLNNLRILEQGSERPLTDTERATLMDEPYRKSKLTYAQARKLLGLEDTAFFKGLRYGKDNAEASTLMEMKAYHAISRALEKEGLKDKKSPLNLSSELQDEIGTAFSLFKTDEDITGRLKDRVQPEILEALLKHISFDKFVQISLKALRRIVPLMEQGKRYDEACAEIYGDHYGKKNTEEKIYLPPIPADEIRNPVVLRALSQARKVINGVVRRYGSPARIHIETAREVGKSFKDRKEIEKRQEENRKDREKAAAKFREYFPNFVGEPKSKDILKLRLYEQQHGKCLYSGKEINLVRLNEKGYVEIDHALPFSRTWDDSFNNKVLVLGSENQNKGNQTPYEYFNGKDNSREWQEFKARVETSRFPRSKKQRILLQKFDEDGFKECNLNDTRYVNRFLCQFVADHILLTGKGKRRVFASNGQITNLLRGFWGLRKVRAENDRHHALDAVVVACSTVAMQQKITRFVRYKEMNAFDGKTIDKETGKVLHQKTHFPQPWEFFAQEVMIRVFGKPDGKPEFEEADTPEKLRTLLAEKLSSRPEAVHEYVTPLFVSRAPNRKMSGAHKDTLRSAKRFVKHNEKISVKRVWLTEIKLADLENMVNYKNGREIELYEALKARLEAYGGNAKQAFDPKDNPFYKKGGQLVKAVRVEKTQESGVLLNKKNAYTIADNGDMVRVDVFCKVDKKGKNQYFIVPIYAWQVAENILPDIDCKGYRIDDSYTFCFSLHKYDLIAFQKDEKSKVEFAYYINCDSSNGRFYLAWHDKGSKEQQFRISTQNLVLIQKYQVNELGKEIRPCRLKKRPPVR

SEQ ID NO: 210 - protein, 1300 aa, Francisella tularensis
  REGION 1..1300: note = MISC_FEATURE - wild type Cpf1 polypeptide sequence
  source 1..1300: note = subspecies novicida
MSIYQEFVNKYSLSKTLRFELIPQGKTLENIKARGLILDDEKRAKDYKKAKQIIDKYHQFFIEEILSSVCISEDLLQNYSDVYFKLKKSDDDNLQKDFKSAKDTIKKQISEYIKDSEKFKNLFNQNLIDAKKGQESDLILWLKQSKDNGIELFKANSDITDIDEALEIIKSFKGWTTYFKGFHENRKNVYSSNDIPTSIIYRIVDDNLPKFLENKAKYESLKDKAPEAINYEQIKKDLAEELTFDIDYKTSEVNQRVFSLDEVFEIANFNNYLNQSGITKFNTIIGGKFVNGENTKRKGINEYINLYSQQINDKTLKKYKMSVLFKQILSDTESKSFVIDKLEDDSDVVTTMQSFYEQIAAFKTVEEKSIKETLSLLFDDLKAQKLDLSKIYFKNDKSLTDLSQQVFDDYSVIGTAVLEYITQQIAPKNLDNPSKKEQELIAKKTEKAKYLSLETIKLALEEFNKHRDIDKQCRFEEILANFAAIPMIFDEIAQNKDNLAQISIKYQNQGKKDLLQASAEDDVKAIKDLLDQTNNLLHKLKIFHISQSEDKANILDKDEHFYLVFEECYFELANIVPLYNKIRNYITQKPYSDEKFKLNFENSTLANGWDKNKEPDNTAILFIKDDKYYLGVMNKKNNKIFDDKAIKENKGEGYKKIVYKLLPGANKMLPKVFFSAKSIKFYNPSEDILRIRNHSTHTKNGSPQKGYEKFEFNIEDCRKFIDFYKQSISKHPEWKDFGFRFSDTQRYNSIDEFYREVENQGYKLTFENISESYIDSVVNQGKLYLFQIYNKDFSAYSKGRPNLHTLYWKALFDERNLQDVVYKLNGEAELFYRKQSIPKKITHPAKEAIANKNKDNPKKESVFEYDLIKDKRFTEDKFFFHCPITINFKSSGANKFNDEINLLLKEKANDVHILSIDRGERHLAYYTLVDGKGNIIKQDTFNIIGNDRMKTNYHDKLAAIEKDRDSARKDWKKINNIKEMKEGYLSQVVHEIAKLVIEYNAIVVFEDLNFGFKRGRFKVEKQVYQKLEKMLIEKLNYLVFKDNEFDKTGGVLRAYQLTAPFETFKKMGKQTGIIYYVPAGFTSKICPVTGFVNQLYPKYESVSKSQEFFSKFDKICYNLDKGYFEFSFDYKNFGDKAAKGKWTIASFGSRLINFRNSDKNHNWDTREVYPTKELEKLLKDYSIEYGHGECIKAAICGESDKKFFAKLTSVLNTILQMRNSKTGTELDYLISPVADVNGNFFDSRQAPKNMPQDADANGAYHIGLKGLMLLGRIKNNQEGKKLNLVIKNEEYFEFVQNRNN

SEQ ID NO: 211 - protein, 1300 aa, Francisella tularensis
  REGION 1..1300: note = MISC_FEATURE - Cpf1 D917A polypeptide sequence
  source 1..1300: note = subspecies novicida
MSIYQEFVNKYSLSKTLRFELIPQGKTLENIKARGLILDDEKRAKDYKKAKQIIDKYHQFFIEEILSSVCISEDLLQNYSDVYFKLKKSDDDNLQKDFKSAKDTIKKQISEYIKDSEKFKNLFNQNLIDAKKGQESDLILWLKQSKDNGIELFKANSDITDIDEALEIIKSFKGWTTYFKGFHENRKNVYSSNDIPTSIIYRIVDDNLPKFLENKAKYESLKDKAPEAINYEQIKKDLAEELTFDIDYKTSEVNQRVFSLDEVFEIANFNNYLNQSGITKFNTIIGGKFVNGENTKRKGINEYINLYSQQINDKTLKKYKMSVLFKQILSDTESKSFVIDKLEDDSDVVTTMQSFYEQIAAFKTVEEKSIKETLSLLFDDLKAQKLDLSKIYFKNDKSLTDLSQQVFDDYSVIGTAVLEYITQQIAPKNLDNPSKKEQELIAKKTEKAKYLSLETIKLALEEFNKHRDIDKQCRFEEILANFAAIPMIFDEIAQNKDNLAQISIKYQNQGKKDLLQASAEDDVKAIKDLLDQTNNLLHKLKIFHISQSEDKANILDKDEHFYLVFEECYFELANIVPLYNKIRNYITQKPYSDEKFKLNFENSTLANGWDKNKEPDNTAILFIKDDKYYLGVMNKKNNKIFDDKAIKENKGEGYKKIVYKLLPGANKMLPKVFFSAKSIKFYNPSEDILRIRNHSTHTKNGSPQKGYEKFEFNIEDCRKFIDFYKQSISKHPEWKDFGFRFSDTQRYNSIDEFYREVENQGYKLTFENISESYIDSVVNQGKLYLFQIYNKDFSAYSKGRPNLHTLYWKALFDERNLQDVVYKLNGEAELFYRKQSIPKKITHPAKEAIANKNKDNPKKESVFEYDLIKDKRFTEDKFFFHCPITINFKSSGANKFNDEINLLLKEKANDVHILSIARGERHLAYYTLVDGKGNIIKQDTFNIIGNDRMKTNYHDKLAAIEKDRDSARKDWKKINNIKEMKEGYLSQVVHEIAKLVIEYNAIVVFEDLNFGFKRGRFKVEKQVYQKLEKMLIEKLNYLVFKDNEFDKTGGVLRAYQLTAPFETFKKMGKQTGIIYYVPAGFTSKICPVTGFVNQLYPKYESVSKSQEFFSKFDKICYNLDKGYFEFSFDYKNFGDKAAKGKWTIASFGSRLINFRNSDKNHNWDTREVYPTKELEKLLKDYSIEYGHGECIKAAICGESDKKFFAKLTSVLNTILQMRNSKTGTELDYLISPVADVNGNFFDSRQAPKNMPQDADANGAYHIGLKGLMLLGRIKNNQEGKKLNLVIKNEEYFEFVQNRNN

SEQ ID NO: 212 - protein, 1300 aa, Francisella tularensis
  REGION 1..1300: note = MISC_FEATURE - Cpf1 E1006A polypeptide sequence
  source 1..1300: note = subspecies novicida
MSIYQEFVNKYSLSKTLRFELIPQGKTLENIKARGLILDDEKRAKDYKKAKQIIDKYHQFFIEEILSSVCISEDLLQNYSDVYFKLKKSDDDNLQKDFKSAKDTIKKQISEYIKDSEKFKNLFNQNLIDAKKGQESDLILWLKQSKDNGIELFKANSDITDIDEALEIIKSFKGWTTYFKGFHENRKNVYSSNDIPTSIIYRIVDDNLPKFLENKAKYESLKDKAPEAINYEQIKKDLAEELTFDIDYKTSEVNQRVFSLDEVFEIANFNNYLNQSGITKFNTIIGGKFVNGENTKRKGINEYINLYSQQINDKTLKKYKMSVLFKQILSDTESKSFVIDKLEDDSDVVTTMQSFYEQIAAFKTVEEKSIKETLSLLFDDLKAQKLDLSKIYFKNDKSLTDLSQQVFDDYSVIGTAVLEYITQQIAPKNLDNPSKKEQELIAKKTEKAKYLSLETIKLALEEFNKHRDIDKQCRFEEILANFAAIPMIFDEIAQNKDNLAQISIKYQNQGKKDLLQASAEDDVKAIKDLLDQTNNLLHKLKIFHISQSEDKANILDKDEHFYLVFEECYFELANIVPLYNKIRNYITQKPYSDEKFKLNFENSTLANGWDKNKEPDNTAILFIKDDKYYLGVMNKKNNKIFDDKAIKENKGEGYKKIVYKLLPGANKMLPKVFFSAKSIKFYNPSEDILRIRNHSTHTKNGSPQKGYEKFEFNIEDCRKFIDFYKQSISKHPEWKDFGFRFSDTQRYNSIDEFYREVENQGYKLTFENISESYIDSVVNQGKLYLFQIYNKDFSAYSKGRPNLHTLYWKALFDERNLQDVVYKLNGEAELFYRKQSIPKKITHPAKEAIANKNKDNPKKESVFEYDLIKDKRFTEDKFFFHCPITINFKSSGANKFNDEINLLLKEKANDVHILSIDRGERHLAYYTLVDGKGNIIKQDTFNIIGNDRMKTNYHDKLAAIEKDRDSARKDWKKINNIKEMKEGYLSQVVHEIAKLVIEYNAIVVFADLNFGFKRGRFKVEKQVYQKLEKMLIEKLNYLVFKDNEFDKTGGVLRAYQLTAPFETFKKMGKQTGIIYYVPAGFTSKICPVTGFVNQLYPKYESVSKSQEFFSKFDKICYNLDKGYFEFSFDYKNFGDKAAKGKWTIASFGSRLINFRNSDKNHNWDTREVYPTKELEKLLKDYSIEYGHGECIKAAICGESDKKFFAKLTSVLNTILQMRNSKTGTELDYLISPVADVNGNFFDSRQAPKNMPQDADANGAYHIGLKGLMLLGRIKNNQEGKKLNLVIKNEEYFEFVQNRNN

SEQ ID NO: 213 - protein, 1300 aa, Francisella tularensis
  REGION 1..1300: note = MISC_FEATURE - Cpf1 D1255A polypeptide sequence
  source 1..1300: note = subspecies novicida
MSIYQEFVNKYSLSKTLRFELIPQGKTLENIKARGLILDDEKRAKDYKKAKQIIDKYHQFFIEEILSSVCISEDLLQNYSDVYFKLKKSDDDNLQKDFKSAKDTIKKQISEYIKDSEKFKNLFNQNLIDAKKGQESDLILWLKQSKDNGIELFKANSDITDIDEALEIIKSFKGWTTYFKGFHENRKNVYSSNDIPTSIIYRIVDDNLPKFLENKAKYESLKDKAPEAINYEQIKKDLAEELTFDIDYKTSEVNQRVFSLDEVFEIANFNNYLNQSGITKFNTIIGGKFVNGENTKRKGINEYINLYSQQINDKTLKKYKMSVLFKQILSDTESKSFVIDKLEDDSDVVTTMQSFYEQIAAFKTVEEKSIKETLSLLFDDLKAQKLDLSKIYFKNDKSLTDLSQQVFDDYSVIGTAVLEYITQQIAPKNLDNPSKKEQELIAKKTEKAKYLSLETIKLALEEFNKHRDIDKQCRFEEILANFAAIPMIFDEIAQNKDNLAQISIKYQNQGKKDLLQASAEDDVKAIKDLLDQTNNLLHKLKIFHISQSEDKANILDKDEHFYLVFEECYFELANIVPLYNKIRNYITQKPYSDEKFKLNFENSTLANGWDKNKEPDNTAILFIKDDKYYLGVMNKKNNKIFDDKAIKENKGEGYKKIVYKLLPGANKMLPKVFFSAKSIKFYNPSEDILRIRNHSTHTKNGSPQKGYEKFEFNIEDCRKFIDFYKQSISKHPEWKDFGFRFSDTQRYNSIDEFYREVENQGYKLTFENISESYIDSVVNQGKLYLFQIYNKDFSAYSKGRPNLHTLYWKALFDERNLQDVVYKLNGEAELFYRKQSIPKKITHPAKEAIANKNKDNPKKESVFEYDLIKDKRFTEDKFFFHCPITINFKSSGANKFNDEINLLLKEKANDVHILSIDRGERHLAYYTLVDGKGNIIKQDTFNIIGNDRMKTNYHDKLAAIEKDRDSARKDWKKINNIKEMKEGYLSQVVHEIAKLVIEYNAIVVFEDLNFGFKRGRFKVEKQVYQKLEKMLIEKLNYLVFKDNEFDKTGGVLRAYQLTAPFETFKKMGKQTGIIYYVPAGFTSKICPVTGFVNQLYPKYESVSKSQEFFSKFDKICYNLDKGYFEFSFDYKNFGDKAAKGKWTIASFGSRLINFRNSDKNHNWDTREVYPTKELEKLLKDYSIEYGHGECIKAAICGESDKKFFAKLTSVLNTILQMRNSKTGTELDYLISPVADVNGNFFDSRQAPKNMPQDAAANGAYHIGLKGLMLLGRIKNNQEGKKLNLVIKNEEYFEFVQNRNN

SEQ ID NO: 214 - protein, 1300 aa, Francisella tularensis
  REGION 1..1300: note = MISC_FEATURE - Cpf1 D917A/E1006A polypeptide sequence
  source 1..1300: note = subspecies novicida
MSIYQEFVNKYSLSKTLRFELIPQGKTLENIKARGLILDDEKRAKDYKKAKQIIDKYHQFFIEEILSSVCISEDLLQNYSDVYFKLKKSDDDNLQKDFKSAKDTIKKQISEYIKDSEKFKNLFNQNLIDAKKGQESDLILWLKQSKDNGIELFKANSDITDIDEALEIIKSFKGWTTYFKGFHENRKNVYSSNDIPTSIIYRIVDDNLPKFLENKAKYESLKDKAPEAINYEQIKKDLAEELTFDIDYKTSEVNQRVFSLDEVFEIANFNNYLNQSGITKFNTIIGGKFVNGENTKRKGINEYINLYSQQINDKTLKKYKMSVLFKQILSDTESKSFVIDKLEDDSDVVTTMQSFYEQIAAFKTVEEKSIKETLSLLFDDLKAQKLDLSKIYFKNDKSLTDLSQQVFDDYSVIGTAVLEYITQQIAPKNLDNPSKKEQELIAKKTEKAKYLSLETIKLALEEFNKHRDIDKQCRFEEILANFAAIPMIFDEIAQNKDNLAQISIKYQNQGKKDLLQASAEDDVKAIKDLLDQTNNLLHKLKIFHISQSEDKANILDKDEHFYLVFEECYFELANIVPLYNKIRNYITQKPYSDEKFKLNFENSTLANGWDKNKEPDNTAILFIKDDKYYLGVMNKKNNKIFDDKAIKENKGEGYKKIVYKLLPGANKMLPKVFFSAKSIKFYNPSEDILRIRNHSTHTKNGSPQKGYEKFEFNIEDCRKFIDFYKQSISKHPEWKDFGFRFSDTQRYNSIDEFYREVENQGYKLTFENISESYIDSVVNQGKLYLFQIYNKDFSAYSKGRPNLHTLYWKALFDERNLQDVVYKLNGEAELFYRKQSIPKKITHPAKEAIANKNKDNPKKESVFEYDLIKDKRFTEDKFFFHCPITINFKSSGANKFNDEINLLLKEKANDVHILSIARGERHLAYYTLVDGKGNIIKQDTFNIIGNDRMKTNYHDKLAAIEKDRDSARKDWKKINNIKEMKEGYLSQVVHEIAKLVIEYNAIVVFADLNFGFKRGRFKVEKQVYQKLEKMLIEKLNYLVFKDNEFDKTGGVLRAYQLTAPFETFKKMGKQTGIIYYVPAGFTSKICPVTGFVNQLYPKYESVSKSQEFFSKFDKICYNLDKGYFEFSFDYKNFGDKAAKGKWTIASFGSRLINFRNSDKNHNWDTREVYPTKELEKLLKDYSIEYGHGECIKAAICGESDKKFFAKLTSVLNTILQMRNSKTGTELDYLISPVADVNGNFFDSRQAPKNMPQDADANGAYHIGLKGLMLLGRIKNNQEGKKLNLVIKNEEYFEFVQNRNN

SEQ ID NO: 215 - protein, 1300 aa, Francisella tularensis
  REGION 1..1300: note = MISC_FEATURE - Cpf1 D917A/D1255A polypeptide sequence
  source 1..1300: note = subspecies novicida
MSIYQEFVNKYSLSKTLRFELIPQGKTLENIKARGLILDDEKRAKDYKKAKQIIDKYHQFFIEEILSSVCISEDLLQNYSDVYFKLKKSDDDNLQKDFKSAKDTIKKQISEYIKDSEKFKNLFNQNLIDAKKGQESDLILWLKQSKDNGIELFKANSDITDIDEALEIIKSFKGWTTYFKGFHENRKNVYSSNDIPTSIIYRIVDDNLPKFLENKAKYESLKDKAPEAINYEQIKKDLAEELTFDIDYKTSEVNQRVFSLDEVFEIANFNNYLNQSGITKFNTIIGGKFVNGENTKRKGINEYINLYSQQINDKTLKKYKMSVLFKQILSDTESKSFVIDKLEDDSDVVTTMQSFYEQIAAFKTVEEKSIKETLSLLFDDLKAQKLDLSKIYFKNDKSLTDLSQQVFDDYSVIGTAVLEYITQQIAPKNLDNPSKKEQELIAKKTEKAKYLSLETIKLALEEFNKHRDIDKQCRFEEILANFAAIPMIFDEIAQNKDNLAQISIKYQNQGKKDLLQASAEDDVKAIKDLLDQTNNLLHKLKIFHISQSEDKANILDKDEHFYLVFEECYFELANIVPLYNKIRNYITQKPYSDEKFKLNFENSTLANGWDKNKEPDNTAILFIKDDKYYLGVMNKKNNKIFDDKAIKENKGEGYKKIVYKLLPGANKMLPKVFFSAKSIKFYNPSEDILRIRNHSTHTKNGSPQKGYEKFEFNIEDCRKFIDFYKQSISKHPEWKDFGFRFSDTQRYNSIDEFYREVENQGYKLTFENISESYIDSVVNQGKLYLFQIYNKDFSAYSKGRPNLHTLYWKALFDERNLQDVVYKLNGEAELFYRKQSIPKKITHPAKEAIANKNKDNPKKESVFEYDLIKDKRFTEDKFFFHCPITINFKSSGANKFNDEINLLLKEKANDVHILSIARGERHLAYYTLVDGKGNIIKQDTFNIIGNDRMKTNYHDKLAAIEKDRDSARKDWKKINNIKEMKEGYLSQVVHEIAKLVIEYNAIVVFEDLNFGFKRGRFKVEKQVYQKLEKMLIEKLNYLVFKDNEFDKTGGVLRAYQLTAPFETFKKMGKQTGIIYYVPAGFTSKICPVTGFVNQLYPKYESVSKSQEFFSKFDKICYNLDKGYFEFSFDYKNFGDKAAKGKWTIASFGSRLINFRNSDKNHNWDTREVYPTKELEKLLKDYSIEYGHGECIKAAICGESDKKFFAKLTSVLNTILQMRNSKTGTELDYLISPVADVNGNFFDSRQAPKNMPQDAAANGAYHIGLKGLMLLGRIKNNQEGKKLNLVIKNEEYFEFVQNRNN

SEQ ID NO: 216 - protein, 1300 aa, Francisella tularensis
  REGION 1..1300: note = MISC_FEATURE - Cpf1 E1006A/D1255A polypeptide sequence
  source 1..1300: note = subspecies novicida
MSIYQEFVNKYSLSKTLRFELIPQGKTLENIKARGLILDDEKRAKDYKKAKQIIDKYHQFFIEEILSSVCISEDLLQNYSDVYFKLKKSDDDNLQKDFKSAKDTIKKQISEYIKDSEKFKNLFNQNLIDAKKGQESDLILWLKQSKDNGIELFKANSDITDIDEALEIIKSFKGWTTYFKGFHENRKNVYSSNDIPTSIIYRIVDDNLPKFLENKAKYESLKDKAPEAINYEQIKKDLAEELTFDIDYKTSEVNQRVFSLDEVFEIANFNNYLNQSGITKFNTIIGGKFVNGENTKRKGINEYINLYSQQINDKTLKKYKMSVLFKQILSDTESKSFVIDKLEDDSDVVTTMQSFYEQIAAFKTVEEKSIKETLSLLFDDLKAQKLDLSKIYFKNDKSLTDLSQQVFDDYSVIGTAVLEYITQQIAPKNLDNPSKKEQELIAKKTEKAKYLSLETIKLALEEFNKHRDIDKQCRFEEILANFAAIPMIFDEIAQNKDNLAQISIKYQNQGKKDLLQASAEDDVKAIKDLLDQTNNLLHKLKIFHISQSEDKANILDKDEHFYLVFEECYFELANIVPLYNKIRNYITQKPYSDEKFKLNFENSTLANGWDKNKEPDNTAILFIKDDKYYLGVMNKKNNKIFDDKAIKENKGEGYKKIVYKLLPGANKMLPKVFFSAKSIKFYNPSEDILRIRNHSTHTKNGSPQKGYEKFEFNIEDCRKFIDFYKQSISKHPEWKDFGFRFSDTQRYNSIDEFYREVENQGYKLTFENISESYIDSVVNQGKLYLFQIYNKDFSAYSKGRPNLHTLYWKALFDERNLQDVVYKLNGEAELFYRKQSIPKKITHPAKEAIANKNKDNPKKESVFEYDLIKDKRFTEDKFFFHCPITINFKSSGANKFNDEINLLLKEKANDVHILSIDRGERHLAYYTLVDGKGNIIKQDTFNIIGNDRMKTNYHDKLAAIEKDRDSARKDWKKINNIKEMKEGYLSQVVHEIAKLVIEYNAIVVFADLNFGFKRGRFKVEKQVYQKLEKMLIEKLNYLVFKDNEFDKTGGVLRAYQLTAPFETFKKMGKQTGIIYYVPAGFTSKICPVTGFVNQLYPKYESVSKSQEFFSKFDKICYNLDKGYFEFSFDYKNFGDKAAKGKWTIASFGSRLINFRNSDKNHNWDTREVYPTKELEKLLKDYSIEYGHGECIKAAICGESDKKFFAKLTSVLNTILQMRNSKTGTELDYLISPVADVNGNFFDSRQAPKNMPQDAAANGAYHIGLKGLMLLGRIKNNQEGKKLNLVIKNEEYFEFVQNRNN

SEQ ID NO: 217 - protein, 1300 aa, Francisella tularensis
  REGION 1..1300: note = MISC_FEATURE - Cpf1 D917A/E1006A/D1255A polypeptide sequence
  source 1..1300: note = subspecies novicida
MSIYQEFVNKYSLSKTLRFELIPQGKTLENIKARGLILDDEKRAKDYKKAKQIIDKYHQFFIEEILSSVCISEDLLQNYSDVYFKLKKSDDDNLQKDFKSAKDTIKKQISEYIKDSEKFKNLFNQNLIDAKKGQESDLILWLKQSKDNGIELFKANSDITDIDEALEIIKSFKGWTTYFKGFHENRKNVYSSNDIPTSIIYRIVDDNLPKFLENKAKYESLKDKAPEAINYEQIKKDLAEELTFDIDYKTSEVNQRVFSLDEVFEIANFNNYLNQSGITKFNTIIGGKFVNGENTKRKGINEYINLYSQQINDKTLKKYKMSVLFKQILSDTESKSFVIDKLEDDSDVVTTMQSFYEQIAAFKTVEEKSIKETLSLLFDDLKAQKLDLSKIYFKNDKSLTDLSQQVFDDYSVIGTAVLEYITQQIAPKNLDNPSKKEQELIAKKTEKAKYLSLETIKLALEEFNKHRDIDKQCRFEEILANFAAIPMIFDEIAQNKDNLAQISIKYQNQGKKDLLQASAEDDVKAIKDLLDQTNNLLHKLKIFHISQSEDKANILDKDEHFYLVFEECYFELANIVPLYNKIRNYITQKPYSDEKFKLNFENSTLANGWDKNKEPDNTAILFIKDDKYYLGVMNKKNNKIFDDKAIKENKGEGYKKIVYKLLPGANKMLPKVFFSAKSIKFYNPSEDILRIRNHSTHTKNGSPQKGYEKFEFNIEDCRKFIDFYKQSISKHPEWKDFGFRFSDTQRYNSIDEFYREVENQGYKLTFENISESYIDSVVNQGKLYLFQIYNKDFSAYSKGRPNLHTLYWKALFDERNLQDVVYKLNGEAELFYRKQSIPKKITHPAKEAIANKNKDNPKKESVFEYDLIKDKRFTEDKFFFHCPITINFKSSGANKFNDEINLLLKEKANDVHILSIARGERHLAYYTLVDGKGNIIKQDTFNIIGNDRMKTNYHDKLAAIEKDRDSARKDWKKINNIKEMKEGYLSQVVHEIAKLVIEYNAIVVFADLNFGFKRGRFKVEKQVYQKLEKMLIEKLNYLVFKDNEFDKTGGVLRAYQLTAPFETFKKMGKQTGIIYYVPAGFTSKICPVTGFVNQLYPKYESVSKSQEFFSKFDKICYNLDKGYFEFSFDYKNFGDKAAKGKWTIASFGSRLINFRNSDKNHNWDTREVYPTKELEKLLKDYSIEYGHGECIKAAICGESDKKFFAKLTSVLNTILQMRNSKTGTELDYLISPVADVNGNFFDSRQAPKNMPQDAAANGAYHIGLKGLMLLGRIKNNQEGKKLNLVIKNEEYFEFVQNRNN

SEQ ID NO: 218 - protein, 1052 aa, Staphylococcus aureus
  REGION 1..1052: note = MISC_FEATURE - Exemplary SaCas9 polypeptide sequence
KRNYILGLDIGITSVGYGIIDYETRDVIDAGVRLFKEANVENNEGRRSKRGARRLKRRRRHRIQRVKKLLFDYNLLTDHSELSGINPYEARVKGLSQKLSEEEFSAALLHLAKRRGVHNVNEVEEDTGNELSTKEQISRNSKALEEKYVAELQLERLKKDGEVRGSINRFKTSDYVKEAKQLLKVQKAYHQLDQSFIDTYIDLLETRRTYYEGPGEGSPFGWKDIKEWYEMLMGHCTYFPEELRSVKYAYNADLYNALNDLNNLVITRDENEKLEYYEKFQIIENVFKQKKKPTLKQIAKEILVNEEDIKGYRVTSTGKPEFTNLKVYHDIKDITARKEIIENAELLDQIAKILTIYQSSEDIQEELTNLNSELTQEEIEQISNLKGYTGTHNLSLKAINLILDELWHTNDNQIAIFNRLKLVPKKVDLSQQKEIPTTLVDDFILSPVVKRSFIQSIKVINAIIKKYGLPNDIIIELAREKNSKDAQKMINEMQKRNRQTNERIEEIIRTTGKENAKYLIEKIKLHDMQEGKCLYSLEAIPLEDLLNNPFNYEVDHIIPRSVSFDNSFNNKVLVKQEENSKKGNRTPFQYLSSSDSKISYETFKKHILNLAKGKGRISKTKKEYLLEERDINRFSVQKDFINRNLVDTRYATRGLMNLLRSYFRVNNLDVKVKSINGGFTSFLRRKWKFKKERNKGYKHHAEDALIIANADFIFKEWKKLDKAKKVMENQMFEEKQAESMPEIETEQEYKEIFITPHQIKHIKDFKDYKYSHRVDKKPNRELINDTLYSTRKDDKGNTLIVNNLNGLYDKDNDKLKKLINKSPEKLLMYHHDPQTYQKLKLIMEQYGDEKNPLYKYYEETGNYLTKYSKKDNGPVIKKIKYYGNKLNAHLDITDDYPNSRNKVVKLSLKPYRFDVYLDNGVYKFVTVKNLDVIKKENYYEVNSKCYEEAKKLKKISNQAEFIASFYNNDLIKINGELYRVIGVNNDLLNRIEVNMIDITYREYLENMNDKRPPRIIKTIASKTQSIKKYSTDILGNLYEVKSKKHPQIIKKG

SEQ ID NO: 219 - protein, 1052 aa, Staphylococcus aureus
  REGION 1..1052: note = MISC_FEATURE - SaCas9n polypeptide sequence
KRNYILGLDIGITSVGYGIIDYETRDVIDAGVRLFKEANVENNEGRRSKRGARRLKRRRRHRIQRVKKLLFDYNLLTDHSELSGINPYEARVKGLSQKLSEEEFSAALLHLAKRRGVHNVNEVEEDTGNELSTKEQISRNSKALEEKYVAELQLERLKKDGEVRGSINRFKTSDYVKEAKQLLKVQKAYHQLDQSFIDTYIDLLETRRTYYEGPGEGSPFGWKDIKEWYEMLMGHCTYFPEELRSVKYAYNADLYNALNDLNNLVITRDENEKLEYYEKFQIIENVFKQKKKPTLKQIAKEILVNEEDIKGYRVTSTGKPEFTNLKVYHDIKDITARKEIIENAELLDQIAKILTIYQSSEDIQEELTNLNSELTQEEIEQISNLKGYTGTHNLSLKAINLILDELWHTNDNQIAIFNRLKLVPKKVDLSQQKEIPTTLVDDFILSPVVKRSFIQSIKVINAIIKKYGLPNDIIIELAREKNSKDAQKMINEMQKRNRQTNERIEEIIRTTGKENAKYLIEKIKLHDMQEGKCLYSLEAIPLEDLLNNPFNYEVDHIIPRSVSFDNSFNNKVLVKQEEASKKGNRTPFQYLSSSDSKISYETFKKHILNLAKGKGRISKTKKEYLLEERDINRFSVQKDFINRNLVDTRYATRGLMNLLRSYFRVNNLDVKVKSINGGFTSFLRRKWKFKKERNKGYKHHAEDALIIANADFIFKEWKKLDKAKKVMENQMFEEKQAESMPEIETEQEYKEIFITPHQIKHIKDFKDYKYSHRVDKKPNRELINDTLYSTRKDDKGNTLIVNNLNGLYDKDNDKLKKLINKSPEKLLMYHHDPQTYQKLKLIMEQYGDEKNPLYKYYEETGNYLTKYSKKDNGPVIKKIKYYGNKLNAHLDITDDYPNSRNKVVKLSLKPYRFDVYLDNGVYKFVTVKNLDVIKKENYYEVNSKCYEEAKKLKKISNQAEFIASFYNNDLIKINGELYRVIGVNNDLLNRIEVNMIDITYREYLENMNDKRPPRIIKTIASKTQSIKKYSTDILGNLYEVKSKKHPQIIKKG

SEQ ID NO: 220 - protein, 1052 aa, Staphylococcus aureus
  REGION 1..1052: note = MISC_FEATURE - SaKKH Cas9 polypeptide sequence
KRNYILGLDIGITSVGYGIIDYETRDVIDAGVRLFKEANVENNEGRRSKRGARRLKRRRRHRIQRVKKLLFDYNLLTDHSELSGINPYEARVKGLSQKLSEEEFSAALLHLAKRRGVHNVNEVEEDTGNELSTKEQISRNSKALEEKYVAELQLERLKKDGEVRGSINRFKTSDYVKEAKQLLKVQKAYHQLDQSFIDTYIDLLETRRTYYEGPGEGSPFGWKDIKEWYEMLMGHCTYFPEELRSVKYAYNADLYNALNDLNNLVITRDENEKLEYYEKFQIIENVFKQKKKPTLKQIAKEILVNEEDIKGYRVTSTGKPEFTNLKVYHDIKDITARKEIIENAELLDQIAKILTIYQSSEDIQEELTNLNSELTQEEIEQISNLKGYTGTHNLSLKAINLILDELWHTNDNQIAIFNRLKLVPKKVDLSQQKEIPTTLVDDFILSPVVKRSFIQSIKVINAIIKKYGLPNDIIIELAREKNSKDAQKMINEMQKRNRQTNERIEEIIRTTGKENAKYLIEKIKLHDMQEGKCLYSLEAIPLEDLLNNPFNYEVDHIIPRSVSFDNSFNNKVLVKQEEASKKGNRTPFQYLSSSDSKISYETFKKHILNLAKGKGRISKTKKEYLLEERDINRFSVQKDFINRNLVDTRYATRGLMNLLRSYFRVNNLDVKVKSINGGFTSFLRRKWKFKKERNKGYKHHAEDALIIANADFIFKEWKKLDKAKKVMENQMFEEKQAESMPEIETEQEYKEIFITPHQIKHIKDFKDYKYSHRVDKKPNRKLINDTLYSTRKDDKGNTLIVNNLNGLYDKDNDKLKKLINKSPEKLLMYHHDPQTYQKLKLIMEQYGDEKNPLYKYYEETGNYLTKYSKKDNGPVIKKIKYYGNKLNAHLDITDDYPNSRNKVVKLSLKPYRFDVYLDNGVYKFVTVKNLDVIKKENYYEVNSKCYEEAKKLKKISNQAEFIASFYKNDLIKINGELYRVIGVNNDLLNRIEVNMIDITYREYLENMNDKRPPHIIKTIASKTQSIKKYSTDILGNLYEVKSKKHPQIIKKG

SEQ ID NO: 221 - protein, 707 aa, synthetic construct
  REGION 1..707: note = Casphi-1 polypeptide sequence
MADTPTLFTQFLRHHLPGQRFRKDILKQAGRILANKGEDATIAFLRGKSEESPPDFQPPVKCPIIACSRPLTEWPIYQASVAIQGYVYGQSLAEFEASDPGCSKDGLLGWFDKTGVCTDYFSVQGLNLIFQNARKRYIGVQTKVTNRNEKRHKKLKRINAKRIAEGLPELTSDEPESALDETGHLIDPPGLNTNIYCYQQVSPKPLALSEVNQLPTAYAGYSTSGDDPIQPMVTKDRLSISKGQPGYIPEHQRALLSQKKHRRMRGYGLKARALLVIVRIQDDWAVIDLRSLLRNAYWRRIVQTKEPSTITKLLKLVTGDPVLDATRMVATFTYKPGIVQVRSAKCLKNKQGSKLFSERYLNETVSVTSIDLGSNNLVAVATYRLVNGNTPELLQRFTLPSHLVKDFERYKQAHDTLEDSIQKTAVASLPQGQQTEIRMWSMYGFREAQERVCQELGLADGSIPWNVMTATSTILTDLFLARGGDPKKCMFTSEPKKKKNSKQVLYKIRDRAWAKMYRTLLSKETREAWNKALWGLKRGSPDYARLSKRKEELARRCVNYTISTAEKRAQCGRTIVALEDLNIGFFHGRGKQEPGWVGLFTRKKENRWLMQALHKAFLELAHHRGYHVIEVNPAYTSQTCPVCRHCDPDNRDQHNREAFHCIGCGFRGNADLDVATHNIAMVAITGESLKRARGSVASKTPQPLAAE

SEQ ID NO: 222 - protein, 757 aa, synthetic construct
  REGION 1..757: note = Casphi-2 polypeptide sequence
MPKPAVESEFSKVLKKHFPGERFRSSYMKRGGKILAAQGEEAVVAYLQGKSEEEPPNFQPPAKCHVVTKSRDFAEWPIMKASEAIQRYIYALSTTERAACKPGKSSESHAAWFAATGVSNHGYSHVQGLNLIFDHTLGRYDGVLKKVQLRNEKARARLESINASRADEGLPEIKAEEEEVATNETGHLLQPPGINPSFYVYQTISPQAYRPRDEIVLPPEYAGYVRDPNAPIPLGVVRNRCDIQKGCPGYIPEWQREAGTAISPKTGKAVTVPGLSPKKNKRMRRYWRSEKEKAQDALLVTVRIGTDWVVIDVRGLLRNARWRTIAPKDISLNALLDLFTGDPVIDVRRNIVTFTYTLDACGTYARKWTLKGKQTKATLDKLTATQTVALVAIDLGQTNPISAGISRVTQENGALQCEPLDRFTLPDDLLKDISAYRIAWDRNEEELRARSVEALPEAQQAEVRALDGVSKETARTQLCADFGLDPKRLPWDKMSSNTTFISEALLSNSVSRDQVFFTPAPKKGAKKKAPVEVMRKDRTWARAYKPRLSVEAQKLKNEALWALKRTSPEYLKLSRRKEELCRRSINYVIEKTRRRTQCQIVIPVIEDLNVRFFHGSGKRLPGWDNFFTAKKENRWFIQGLHKAFSDLRTHRSFYVFEVRPERTSITCPKCGHCEVGNRDGEAFQCLSCGKTCNADLDVATHNLTQVALTGKTMPKREEPRDAQGTAPARKTKKASKSKAPPAEREDQTPAQEPSQTS

SEQ ID NO: 223 - protein, 766 aa, synthetic construct
  REGION 1..766: note = Casphi-3 polypeptide sequence
MEKEITELTKIRREFPNKKFSSTDMKKAGKLLKAEGPDAVRDFLNSCQEIIGDFKPPVKTNIVSISRPFEEWPVSMVGRAIQEYYFSLTKEELESVHPGTSSEDHKSFFNITGLSNYNYTSVQGLNLIFKNAKAIYDGTLVKANNKNKKLEKKFNEINHKRSLEGLPIITPDFEEPFDENGHLNNPPGINRNIYGYQGCAAKVFVPSKHKMVSLPKEYEGYNRDPNLSLAGFRNRLEIPEGEPGHVPWFQRMDIPEGQIGHVNKIQRFNFVHGKNSGKVKFSDKTGRVKRYHHSKYKDATKPYKFLEESKKVSALDSILAIITIGDDWVVFDIRGLYRNVFYRELAQKGLTAVQLLDLFTGDPVIDPKKGVVTFSYKEGVVPVFSQKIVPRFKSRDTLEKLTSQGPVALLSVDLGQNEPVAARVCSLKNINDKITLDNSCRISFLDDYKKQIKDYRDSLDELEIKIRLEAINSLETNQQVEIRDLDVFSADRAKANTVDMFDIDPNLISWDSMSDARVSTQISDLYLKNGGDESRVYFEINNKRIKRSDYNISQLVRPKLSDSTRKNLNDSIWKLKRTSEEYLKLSKRKLELSRAVVNYTIRQSKLLSGINDIVIILEDLDVKKKFNGRGIRDIGWDNFFSSRKENRWFIPAFHKAFSELSSNRGLCVIEVNPAWTSATCPDCGFCSKENRDGINFTCRKCGVSYHADIDVATLNIARVAVLGKPMSGPADRERLGDTKKPRVARSRKTMKRKDISNSTVEAMVTA

SEQ ID NO: 224 - protein, 765 aa, synthetic construct
  REGION 1..765: note = Casphi-4 polypeptide sequence
MYSLEMADLKSEPSLLAKLLRDRFPGKYWLPKYWKLAEKKRLTGGEEAACEYMADKQLDSPPPNFRPPARCVILAKSRPFEDWPVHRVASKAQSFVIGLSEQGFAALRAAPPSTADARRDWLRSHGASEDDLMALEAQLLETIMGNAISLHGGVLKKIDNANVKAAKRLSGRNEARLNKGLQELPPEQEGSAYGADGLLVNPPGLNLNIYCRKSCCPKPVKNTARFVGHYPGYLRDSDSILISGTMDRLTIIEGMPGHIPAWQREQGLVKPGGRRRRLSGSESNMRQKVDPSTGPRRSTRSGTVNRSNQRTGRNGDPLLVEIRMKEDWVLLDARGLLRNLRWRESKRGLSCDHEDLSLSGLLALFSGDPVIDPVRNEVVFLYGEGIIPVRSTKPVGTRQSKKLLERQASMGPLTLISCDLGQTNLIAGRASAISLTHGSLGVRSSVRIELDPEIIKSFERLRKDADRLETEILTAAKETLSDEQRGEVNSHEKDSPQTAKASLCRELGLHPPSLPWGQMGPSTTFIADMLISHGRDDDAFLSHGEFPTLEKRKKFDKRFCLESRPLLSSETRKALNESLWEVKRTSSEYARLSQRKKEMARRAVNFVVEISRRKTGLSNVIVNIEDLNVRIFHGGGKQAPGWDGFFRPKSENRWFIQAIHKAFSDLAAHHGIPVIESDPQRTSMTCPECGHCDSKNRNGVRFLCKGCGASMDADFDAACRNLERVALTGKPMPKPSTSCERLLSATTGKVCSDHSLSHDAIEKAS

SEQ ID NO: 225 - protein, 793 aa, synthetic construct
  REGION 1..793: note = Casphi-5 polypeptide sequence
MSSLPTPLELLKQKHADLFKGLQFSSKDNKMAGKVLKKDGEEAALAFLSERGVSRGELPNFRPPAKTLVVAQSRPFEEFPIYRVSEAIQLYVYSLSVKELETVPSGSSTKKEHQRFFQDSSVPDFGYTSVQGLNKIFGLARGIYLGVITRGENQLQKAKSKHEALNKKRRASGEAETEFDPTPYEYMTPERKLAKPPGVNHSIMCYVDISVDEFDFRNPDGIVLPSEYAGYCREINTAIEKGTVDRLGHLKGGPGYIPGHQRKESTTEGPKINFRKGRIRRSYTALYAKRDSRRVRQGKLALPSYRHHMMRLNSNAESAILAVIFFGKDWVVFDLRGLLRNVRWRNLFVDGSTPSTLLGMFGDPVIDPKRGVVAFCYKEQIVPVVSKSITKMVKAPELLNKLYLKSEDPLVLVAIDLGQTNPVGVGVYRVMNASLDYEVVTRFALESELLREIESYRQRTNAFEAQIRAETFDAMTSEEQEEITRVRAFSASKAKENVCHRFGMPVDAVDWATMGSNTIHIAKWVMRHGDPSLVEVLEYRKDNEIKLDKNGVPKKVKLTDKRIANLTSIRLRFSQETSKHYNDTMWELRRKHPVYQKLSKSKADFSRRVVNSIIRRVNHLVPRARIVFIIEDLKNLGKVFHGSGKRELGWDSYFEPKSENRWFIQVLHKAFSETGKHKGYYIIECWPNWTSCTCPKCSCCDSENRHGEVFRCLACGYTCNTDFGTAPDNLVKIATTGKGLPGPKKRCKGSSKGKNPKIARSSETGVSVTESGAPKVKKSSPTQTSQSSSQSAP

SEQ ID NO: 226 - protein, 441 aa, synthetic construct
  REGION 1..441: note = Casphi-6 polypeptide sequence
MNKIEKEKTPLAKLMNENFAGLRFPFAIIKQAGKKLLKEGELKTIEYMTGKGSIEPLPNFKPPVKCLIVAKRRDLKYFPICKASCEIQSYVYSLNYKDFMDYFSTPMTSQKQHEEFFKKSGLNIEYQNVAGLNLIFNNVKNTYNGVILKVKNRNEKLKKKAIKNNYEFEEIKTFNDDGCLINKPGINNVIYCFQSISPKILKNITHLPKEYNDYDCSVDRNIIQKYVSRLDIPESQPGHVPEWQRKLPEFNNTNNPRRRRKWYSNGRNISKGYSVDQVNQAKIEDSLLAQIKIGEDWIILDIRGLLRDLNRRELISYKNKLTIKDVLGFFSDYPIIDIKKNLVTFCYKEGVIQVVSQKSIGNKKSKQLLEKLIENKPIALVSIDLGQTNPVSVKISKLNKINNKISIESFTYRFLNEEILKEIEKYRKDYDKLELKLINEA

SEQ ID NO: 227 - protein, 772 aa, synthetic construct
  REGION 1..772: note = Casphi-7 polypeptide sequence
MSNTAVSTREHMSNKTTPPSPLSLLLRAHFPGLKFESQDYKIAGKKLRDGGPEAVISYLTGKGQAKLKDVKPPAKAFVIAQSRPFIEWDLVRVSRQIQEKIFGIPATKGRPKQDGLSETAFNEAVASLEVDGKSKLNEETRAAFYEVLGLDAPSLHAQAQNALIKSAISIREGVLKKVENRNEKNLSKTKRRKEAGEEATFVEEKAHDERGYLIHPPGVNQTIPGYQAVVIKSCPSDFIGLPSGCLAKESAEALTDYLPHDRMTIPKGQPGYVPEWQHPLLNRRKNRRRRDWYSASLNKPKATCSKRSGTPNRKNSRTDQIQSGRFKGAIPVLMRFQDEWVIIDIRGLLRNARYRKLLKEKSTIPDLLSLFTGDPSIDMRQGVCTFIYKAGQACSAKMVKTKNAPEILSELTKSGPVVLVSIDLGQTNPIAAKVSRVTQLSDGQLSHETLLRELLSNDSSDGKEIARYRVASDRLRDKLANLAVERLSPEHKSEILRAKNDTPALCKARVCAALGLNPEMIAWDKMTPYTEFLATAYLEKGGDRKVATLKPKNRPEMLRRDIKFKGTEGVRIEVSPEAAEAYREAQWDLQRTSPEYLRLSTWKQELTKRILNQLRHKAAKSSQCEVVVMAFEDLNIKMMHGNGKWADGGWDAFFIKKRENRWFMQAFHKSLTELGAHKGVPTIEVTPHRTSITCTKCGHCDKANRDGERFACQKCGFVAHADLEIATDNIERVALTGKPMPKPESERSGDAKKSVGARKAAFKPEEDAEAAE

SEQ ID NO: 228 - protein, 717 aa, synthetic construct
  REGION 1..717: note = Casphi-8 polypeptide sequence
MIKPTVSQFLTPGFKLIRNHSRTAGLKLKNEGEEACKKFVRENEIPKDECPNFQGGPAIANIIAKSREFTEWEIYQSSLAIQEVIFTLPKDKLPEPILKEEWRAQWLSEHGLDTVPYKEAAGLNLIIKNAVNTYKGVQVKVDNKNKNNLAKINRKNEIAKLNGEQEISFEEIKAFDDKGYLLQKPSPNKSIYCYQSVSPKPFITSKYHNVNLPEEYIGYYRKSNEPIVSPYQFDRLRIPIGEPGYVPKWQYTFLSKKENKRRKLSKRIKNVSPILGIICIKKDWCVFDMRGLLRTNHWKKYHKPTDSINDLFDYFTGDPVIDTKANVVRFRYKMENGIVNYKPVREKKGKELLENICDQNGSCKLATVDVGQNNPVAIGLFELKKVNGELTKTLISRHPTPIDFCNKITAYRERYDKLESSIKLDAIKQLTSEQKIEVDNYNNNFTPQNTKQIVCSKLNINPNDLPWDKMISGTHFISEKAQVSNKSEIYFTSTDKGKTKDVMKSDYKWFQDYKPKLSKEVRDALSDIEWRLRRESLEFNKLSKSREQDARQLANWISSMCDVIGIENLVKKNNFFGGSGKREPGWDNFYKPKKENRWWINAIHKALTELSQNKGKRVILLPAMRTSITCPKCKYCDSKNRNGEKFNCLKCGIELNADIDVATENLATVAITAQSMPKPTCERSGDAKKPVRARKAKAPEFHDKLAPSYTVVLREAV

SEQ ID NO: 229 - protein, 793 aa, synthetic construct
  REGION 1..793: note = Casphi-9 polypeptide sequence
MRSSREIGDKILMRQPAEKTAFQVFRQEVIGTQKLSGGDAKTAGRLYKQGKMEAAREWLLKGARDDVPPNFQPPAKCLVVAVSHPFEEWDISKTNHDVQAYIYAQPLQAEGHLNGLSEKWEDTSADQHKLWFEKTGVPDRGLPVQAINKIAKAAVNRAFGVVRKVENRNEKRRSRDNRIAEHNRENGLTEVVREAPEVATNADGFLLHPPGIDPSILSYASVSPVPYNSSKHSFVRLPEEYQAYNVEPDAPIPQFVVEDRFAIPPGQPGYVPEWQRLKCSTNKHRRMRQWSNQDYKPKAGRRAKPLEFQAHLTRERAKGALLVVMRIKEDWVVFDVRGLLRNVEWRKVLSEEAREKLTLKGLLDLFTGDPVIDTKRGIVTFLYKAEITKILSKRTVKTKNARDLLLRLTEPGEDGLRREVGLVAVDLGQTHPIAAAIYRIGRTSAGALESTVLHRQGLREDQKEKLKEYRKRHTALDSRLRKEAFETLSVEQQKEIVTVSGSGAQITKDKVCNYLGVDPSTLPWEKMGSYTHFISDDFLRRGGDPNIVHFDRQPKKGKVSKKSQRIKRSDSQWVGRMRPRLSQETAKARMEADWAAQNENEEYKRLARSKQELARWCVNTLLQNTRCITQCDEIVVVIEDLNVKSLHGKGAREPGWDNFFTPKTENRWFIQILHKTFSELPKHRGEHVIEGCPLRTSITCPACSYCDKNSRNGEKFVCVACGATFHADFEVATYNLVRLATTGMPMPKSLERQGGGEKAGGARKARKKAKQVEKIVVQANANVTMNGASLHSP

SEQ ID NO: 230 - protein, 812 aa, synthetic construct
  REGION 1..812: note = Casphi-10 polypeptide sequence
MDMLDTETNYATETPAQQQDYSPKPPKKAQRAPKGFSKKARPEKKPPKPITLFTQKHFSGVRFLKRVIRDASKILKLSESRTITFLEQAIERDGSAPPDVTPPVHNTIMAVTRPFEEWPEVILSKALQKHCYALTKKIKIKTWPKKGPGKKCLAAWSARTKIPLIPGQVQATNGLFDRIGSIYDGVEKKVTNRNANKKLEYDEAIKEGRNPAVPEYETAYNIDGTLINKPGYNPNLYITQSRTPRLITEADRPLVEKILWQMVEKKTQSRNQARRARLEKAAHLQGLPVPKFVPEKVDRSQKIEIRIIDPLDKIEPYMPQDRMAIKASQDGHVPYWQRPFLSKRRNRRVRAGWGKQVSSIQAWLTGALLVIVRLGNEAFLADIRGALRNAQWRKLLKPDATYQSLFNLFTGDPVVNTRTNHLTMAYREGVVNIVKSRSFKGRQTREHLLTLLGQGKTVAGVSFDLGQKHAAGLLAAHFGLGEDGNPVFTPIQACFLPQRYLDSLTNYRNRYDALTLDMRRQSLLALTPAQQQEFADAQRDPGGQAKRACCLKLNLNPDEIRWDLVSGISTMISDLYIERGGDPRDVHQQVETKPKGKRKSEIRILKIRDGKWAYDFRPKIADETRKAQREQLWKLQKASSEFERLSRYKINIARAIANWALQWGRELSGCDIVIPVLEDLNVGSKFFDGKGKWLLGWDNRFTPKKENRWFIKVLHKAVAELAPHRGVPVYEVMPHRTSMTCPACHYCHPTNREGDRFECQSCHVVKNTDRDVAPYNILRVAVEGKTLDRWQAEKKPQAEPDRPMILIDNQES

SEQ ID NO: 231 - protein, 84 aa, synthetic construct
  REGION 1..84: note = synthetic polypeptide sequence
MTNLSDIIEKETGKQLVIQESILMLPEEVEEVIGNKPESDILVHTAYDESTDENVMLLTSDAPEYKPWALVIQDSNGENKIKML

SEQ ID NO: 232 - protein, 1129 aa, Alicyclobacillus acidoterrestris
  REGION 1..1129: note = MISC_FEATURE - Cas12b/C2c1; sp|T0D7A2|C2C1_ALIAG CRISPR-associated endonuclease C2c1 OS = Alicyclobacillus acido-terrestris (strain ATCC 49025 /DSM 3922/ CIP 106132 / NCIMB 13137/GD3B) GN=c2c1 PE=1 SV=1; Cas12b/C2c1 polypeptide sequence
MAVKSIKVKLRLDDMPEIRAGLWKLHKEVNAGVRYYTEWLSLLRQENLYRRSPNGDGEQECDKTAEECKAELLERLRARQVENGHRGPAGSDDELLQLARQLYELLVPQAIGAKGDAQQIARKFLSPLADKDAVGGLGIAKAGNKPRWVRMREAGEPGWEEEKEKAETRKSADRTADVLRALADFGLKPLMRVYTDSEMSSVEWKPLRKGQAVRTWDRDMFQQAIERMMSWESWNQRVGQEYAKLVEQKNRFEQKNFVGQEHLVHLVNQLQQDMKEASPGLESKEQTAHYVTGRALRGSDKVFEKWGKLAPDAPFDLYDAEIKNVQRRNTRRFGSHDLFAKLAEPEYQALWREDASFLTRYAVYNSILRKLNHAKMFATFTLPDATAHPIWTRFDKLGGNLHQYTFLFNEFGERRHAIRFHKLLKVENGVAREVDDVTVPISMSEQLDNLLPRDPNEPIALYFRDYGAEQHFTGEFGGAKIQCRRDQLAHMHRRRGARDVYLNVSVRVQSQSEARGERRPPYAAVFRLVGDNHRAFVHFDKLSDYLAEHPDDGKLGSEGLLSGLRVMSVDLGLRTSASISVFRVARKDELKPNSKGRVPFFFPIKGNDNLVAVHERSQLLKLPGETESKDLRAIREERQRTLRQLRTQLAYLRLLVRCGSEDVGRRERSWAKLIEQPVDAANHMTPDWREAFENELQKLKSLHGICSDKEWMDAVYESVRRVWRHMGKQVRDWRKDVRSGERPKIRGYAKDVVGGNSIEQIEYLERQYKFLKSWSFFGKVSGQVIRAEKGSRFAITLREHIDHAKEDRLKKLADRIIMEALGYVYALDERGKGKWVAKYPPCQLILLEELSEYQFNNDRPPSENNQLMQWSHRGVFQELINQAQVHDLLVGTMYAAFSSRFDARTGAPGIRCRRVPARCTQEHNPEPFPWWLNKFVVEHTLDACPLRADDLIPTGEGEIFVSPFSAEEGDFHQIHADLNAAQNLQQRLWSDFDISQIRLRCDWGEVDGELVLIPRLTGKRTADSYSNKVFYTNTGVTYYERERGKKRRKVFAQEKLSEEEAELLVEADEAREKSVVLMRDPSGIINRGNWTRQKEFWSMVNQRIEGYLVKQIRSRVPLQDSACENTGDI

SEQ ID NO: 233 - protein, 1368 aa, Mus musculus
  REGION 1..1368: note = MISC_FEATURE - high fidelity Cas9 polypeptide sequence
MDKKYSIGLAIGTNSVGWAVITDEYKVPSKKFKVLGNTDRHSIKKNLIGALLFDSGETAEATRLKRTARRRYTRRKNRICYLQEIFSNEMAKVDDSFFHRLEESFLVEEDKKHERHPIFGNIVDEVAYHEKYPTIYHLRKKLVDSTDKADLRLIYLALAHMIKFRGHFLIEGDLNPDNSDVDKLFIQLVQTYNQLFEENPINASGVDAKAILSARLSKSRRLENLIAQLPGEKKNGLFGNLIALSLGLTPNFKSNFDLAEDAKLQLSKDTYDDDLDNLLAQIGDQYADLFLAAKNLSDAILLSDILRVNTEITKAPLSASMIKRYDEHHQDLTLLKALVRQQLPEKYKEIFFDQSKNGYAGYIDGGASQEEFYKFIKPILEKMDGTEELLVKLNREDLLRKQRTFDNGSIPHQIHLGELHAILRRQEDFYPFLKDNREKIEKILTFRIPYYVGPLARGNSRFAWMTRKSEETITPWNFEEVVDKGASAQSFIERMTAFDKNLPNEKVLPKHSLLYEYFTVYNELTKVKYVTEGMRKPAFLSGEQKKAIVDLLFKTNRKVTVKQLKEDYFKKIECFDSVEISGVEDRFNASLGTYHDLLKIIKDKDFLDNEENEDILEDIVLTLTLFEDREMIEERLKTYAHLFDDKVMKQLKRRRYTGWGALSRKLINGIRDKQSGKTILDFLKSDGFANRNFMALIHDDSLTFKEDIQKAQVSGQGDSLHEHIANLAGSPAIKKGILQTVKVVDELVKVMGRHKPENIVIEMARENQTTQKGQKNSRERMKRIEEGIKELGSQILKEHPVENTQLQNEKLYLYYLQNGRDMYVDQELDINRLSDYDVDHIVPQSFLKDDSIDNKVLTRSDKNRGKSDNVPSEEVVKKMKNYWRQLLNAKLITQRKFDNLTKAERGGLSELDKAGFIKRQLVETRAITKHVAQILDSRMNTKYDENDKLIREVKVITLKSKLVSDFRKDFQFYKVREINNYHHAHDAYLNAVVGTALIKKYPKLESEFVYGDYKVYDVRKMIAKSEQEIGKATAKYFFYSNIMNFFKTEITLANGEIRKRPLIETNGETGEIVWDKGRDFATVRKVLSMPQVNIVKKTEVQTGGFSKESILPKRNSDKLIARKKDWDPKKYGGFDSPTVAYSVLVVAKVEKGKSKKLKSVKELLGITIMERSSFEKNPIDFLEAKGYKEVKKDLIIKLPKYSLFELENGRKRMLASAGELQKGNELALPSKYVNFLYLASHYEKLKGSPEDNEQKQLFVEQHKHYLDEIIEQISEFSKRVILADANLDKVLSAYNKHRDKPIREQAENIIHLFTLTNLGAPAAFKYFDTTIDRKRYTSTKEVLDATLIHQSITGLYETRIDLSQLGGD

SEQ ID NO: 234 - protein, 1368 aa, Streptococcus pyogenes
  REGION 1..1368: note = MISC_FEATURE - PAM-binding SpEQR Cas9 polypeptide sequence
MDKKYSIGLAIGTNSVGWAVITDEYKVPSKKFKVLGNTDRHSIKKNLIGALLFDSGETAEATRLKRTARRRYTRRKNRICYLQEIFSNEMAKVDDSFFHRLEESVLVEEDKKHERHPIFGNIVDEVAYHEKYPTIYHLRKKLVDSTDKADLRLIYLALAHMIKFRGHFLIEGDLNPDNSDVDKLFIQLVQTYNQLFEENPINASGVDAKAILSARLSKSRRLENLIAQLPGEKKNGLFGNLIALSLGLTPNFKSNFDLAEDAKLQLSKDTYDDDLDNLLAQIGDQYADLFLAAKNLSDAILLSDILRVNTEITKAPLSASMIKRYDEHHQDLTLLKALVRQQLPEKYKEIFFDQSKNGYAGYIDGGASQEEFYKFIKPILEKMDGTEELLVKLNREDLLRKQRTFDNGSIPHQIHLGELHAILRRQEDFYPFLKDNREKIEKILTFRIPYYVGPLARGNSRFAWMTRKSEETITPWNFEEVVDKGASAQSFIERMTNFDKNLPNEKVLPKHSLLYEYFTVYNELTKVKYVTEGMRKPAFLSGEQKKAIVDLLFKTNRKVTVKQLKEDYFKKIECFDSVEISGVEDRFNASLGTYHDLLKIIKDKDFLDNEENEDILEDIVLTLTLFEDREMIEERLKTYAHLFDDKVMKQLKRRRYTGWGRLSRKLINGIRDKQSGKTILDFLKSDGFANRNFMQLIHDDSLTFKEDIQKAQVSGQGDSLHEHIANLAGSPAIKKGILQTVKVVDELVKVMGRHKPENIVIEMARENQTTQKGQKNSRERMKRIEEGIKELGSQILKEHPVENTQLQNEKLYLYYLQNGRDMYVDQELDINRLSDYDVDHIVPQSFLKDDSIDNKVLTRSDKNRGKSDNVPSEEVVKKMKNYWRQLLNAKLITQRKFDNLTKAERGGLSELDKAGFIKRQLVETRQITKHVAQILDSRMNTKYDENDKLIREVKVITLKSKLVSDFRKDFQFYKVREINNYHHAHDAYLNAVVGTALIKKYPKLESEFVYGDYKVYDVRKMIAKSEQEIGKATAKYFFYSNIMNFFKTEITLANGEIRKRPLIETNGETGEIVWDKGRDFATVRKVLSMPQVNIVKKTEVQTGGFSKESILPKRNSDKLIARKKDWDPKKYGGFESPTVAYSVLVVAKVEKGKSKKLKSVKELLGITIMERSSFEKNPIDFLEAKGYKEVKKDLIIKLPKYSLFELENGRKRMLASAGELQKGNELALPSKYVNFLYLASHYEKLKGSPEDNEQKQLFVEQHKHYLDEIIEQISEFSKRVILADANLDKVLSAYNKHRDKPIREQAENIIHLFTLTNLGAPAAFKYFDTTIDRKQYRSTKEVLDATLIHQSITGLYETRIDLSQLGGD

SEQ ID NO: 235 - protein, 1368 aa, Streptococcus pyogenes
  REGION 1..1368: note = MISC_FEATURE - PAM-binding SpVQR Cas9 polypeptide sequence
MDKKYSIGLAIGTNSVGWAVITDEYKVPSKKFKVLGNTDRHSIKKNLIGALLFDSGETAEATRLKRTARRRYTRRKNRICYLQEIFSNEMAKVDDSFFHRLEESFLVEEDKKHERHPIFGNIVDEVAYHEKYPTIYHLRKKLVDSTDKADLRLIYLALAHMIKFRGHFLIEGDLNPDNSDVDKLFIQLVQTYNQLFEENPINASGVDAKAILSARLSKSRRLENLIAQLPGEKKNGLFGNLIALSLGLTPNFKSNFDLAEDAKLQLSKDTYDDDLDNLLAQIGDQYADLFLAAKNLSDAILLSDILRVNTEITKAPLSASMIKRYDEHHQDLTLLKALVRQQLPEKYKEIFFDQSKNGYAGYIDGGASQEEFYKFIKPILEKMDGTEELLVKLNREDLLRKQRTFDNGSIPHQIHLGELHAILRRQEDFYPFLKDNREKIEKILTFRIPYYVGPLARGNSRFAWMTRKSEETITPWNFEEVVDKGASAQSFIERMTNFDKNLPNEKVLPKHSLLYEYFTVYNELTKVKYVTEGMRKPAFLSGEQKKAIVDLLFKTNRKVTVKQLKEDYFKKIECFDSVEISGVEDRFNASLGTYHDLLKIIKDKDFLDNEENEDILEDIVLTLTLFEDREMIEERLKTYAHLFDDKVMKQLKRRRYTGWGRLSRKLINGIRDKQSGKTILDFLKSDGFANRNFMQLIHDDSLTFKEDIQKAQVSGQGDSLHEHIANLAGSPAIKKGILQTVKVVDELVKVMGRHKPENIVIEMARENQTTQKGQKNSRERMKRIEEGIKELGSQILKEHPVENTQLQNEKLYLYYLQNGRDMYVDQELDINRLSDYDVDHIVPQSFLKDDSIDNKVLTRSDKNRGKSDNVPSEEVVKKMKNYWRQLLNAKLITQRKFDNLTKAERGGLSELDKAGFIKRQLVETRQITKHVAQILDSRMNTKYDENDKLIREVKVITLKSKLVSDFRKDFQFYKVREINNYHHAHDAYLNAVVGTALIKKYPKLESEFVYGDYKVYDVRKMIAKSEQEIGKATAKYFFYSNIMNFFKTEITLANGEIRKRPLIETNGETGEIVWDKGRDFATVRKVLSMPQVNIVKKTEVQTGGFSKESILPKRNSDKLIARKKDWDPKKYGGFVSPTVAYSVLVVAKVEKGKSKKLKSVKELLGITIMERSSFEKNPIDFLEAKGYKEVKKDLIIKLPKYSLFELENGRKRMLASAGELQKGNELALPSKYVNFLYLASHYEKLKGSPEDNEQKQLFVEQHKHYLDEIIEQISEFSKRVILADANLDKVLSAYNKHRDKPIREQAENIIHLFTLTNLGAPAAFKYFDTTIDRKQYRSTKEVLDATLIHQSITGLYETRIDLSQLGGD

SEQ ID NO: 236 - protein, 1368 aa, Streptococcus pyogenes
  REGION 1..1368: note = MISC_FEATURE - SpVQR Cas9 polypeptide sequence
MDKKYSIGLAIGTNSVGWAVITDEYKVPSKKFKVLGNTDRHSIKKNLIGALLFDSGETAEATRLKRTARRRYTRRKNRICYLQEIFSNEMAKVDDSFFHRLEESFLVEEDKKHERHPIFGNIVDEVAYHEKYPTIYHLRKKLVDSTDKADLRLIYLALAHMIKFRGHFLIEGDLNPDNSDVDKLFIQLVQTYNQLFEENPINASGVDAKAILSARLSKSRRLENLIAQLPGEKKNGLFGNLIALSLGLTPNFKSNFDLAEDAKLQLSKDTYDDDLDNLLAQIGDQYADLFLAAKNLSDAILLSDILRVNTEITKAPLSASMIKRYDEHHQDLTLLKALVRQQLPEKYKEIFFDQSKNGYAGYIDGGASQEEFYKFIKPILEKMDGTEELLVKLNREDLLRKQRTFDNGSIPHQIHLGELHAILRRQEDFYPFLKDNREKIEKILTFRIPYYVGPLARGNSRFAWMTRKSEETITPWNFEEVVDKGASAQSFIERMTNFDKNLPNEKVLPKHSLLYEYFTVYNELTKVKYVTEGMRKPAFLSGEQKKAIVDLLFKTNRKVTVKQLKEDYFKKIECFDSVEISGVEDRFNASLGTYHDLLKIIKDKDFLDNEENEDILEDIVLTLTLFEDREMIEERLKTYAHLFDDKVMKQLKRRRYTGWGRLSRKLINGIRDKQSGKTILDFLKSDGFANRNFMQLIHDDSLTFKEDIQKAQVSGQGDSLHEHIANLAGSPAIKKGILQTVKVVDELVKVMGRHKPENIVIEMARENQTTQKGQKNSRERMKRIEEGIKELGSQILKEHPVENTQLQNEKLYLYYLQNGRDMYVDQELDINRLSDYDVDHIVPQSFLKDDSIDNKVLTRSDKNRGKSDNVPSEEVVKKMKNYWRQLLNAKLITQRKFDNLTKAERGGLSELDKAGFIKRQLVETRQITKHVAQILDSRMNTKYDENDKLIREVKVITLKSKLVSDFRKDFQFYKVREINNYHHAHDAYLNAVVGTALIKKYPKLESEFVYGDYKVYDVRKMIAKSEQEIGKATAKYFFYSNIMNFFKTEITLANGEIRKRPLIETNGETGEIVWDKGRDFATVRKVLSMPQVNIVKKTEVQTGGFSKESILPKRNSDKLIARKKDWDPKKYGGFVSPTVAYSVLVVAKVEKGKSKKLKSVKELLGITIMERSSFEKNPIDFLEAKGYKEVKKDLIIKLPKYSLFELENGRKRMLASARELQKGNELALPSKYVNFLYLASHYEKLKGSPEDNEQKQLFVEQHKHYLDEIIEQISEFSKRVILADANLDKVLSAYNKHRDKPIREQAENIIHLFTLTNLGAPAAFKYFDTTIDRKEYRSTKEVLDATLIHQSITGLYETRIDLSQLGGD

SEQ ID NO: 237 - protein, 1359 aa, Streptococcus macacae
  REGION 1..1359: note = MISC_FEATURE - SpyMacCas9 polypeptide sequence
MDKKYSIGLDIGTNSVGWAVITDDYKVPSKKFKVLGNTDRHSIKKNLIGALLFGSGETAEATRLKRTARRRYTRRKNRICYLQEIFSNEMAKVDDSFFHRLEESFLVEEDKKHERHPIFGNIVDEVAYHEKYPTIYHLRKKLADSTDKADLRLIYLALAHMIKFRGHFLIEGDLNPDNSDVDKLFIQLVQIYNQLFEENPINASRVDAKAILSARLSKSRRLENLIAQLPGEKRNGLFGNLIALSLGLTPNFKSNFDLAEDAKLQLSKDTYDDDLDNLLAQIGDQYADLFLAAKNLSDAILLSDILRVNSEITKAPLSASMIKRYDEHHQDLTLLKALVRQQLPEKYKEIFFDQSKNGYAGYIDGGASQEEFYKFIKPILEKMDGTEELLVKLNREDLLRKQRTFDNGSIPHQIHLGELHAILRRQEDFYPFLKDNREKIEKILTFRIPYYVGPLARGNSRFAWMTRKSEETITPWNFEEVVDKGASAQSFIERMTNFDKNLPNEKVLPKHSLLYEYFTVYNELTKVKYVTEGMRKPAFLSGEQKKAIVDLLFKTNRKVTVKQLKEDYFKKIECFDSVEISGVEDRFNASLGAYHDLLKIIKDKDFLDNEENEDILEDIVLTLTLFEDRGMIEERLKTYAHLFDDKVMKQLKRRRYTGWGRLSRKLINGIRDKQSGKTILDFLKSDGFANRNFMQLIHDDSLTFKEDIQKAQVSGQGHSLHEQIANLAGSPAIKKGILQTVKIVDELVKVMGHKPENIVIEMARENQTTQKGQKNSRERMKRIEEGIKELGSQILKEHPVENTQLQNEKLYLYYLQNGRDMYVDQELDINRLSDYDVDHIVPQSFIKDDSIDNKVLTRSDKNRGKSDNVPSEEVVKKMKNYWRQLLNAKLITQRKFDNLTKAERGGLSELDKAGFIKRQLVETRQITKHVAQILDSRMNTKYDENDKLIREVKVITLKSKLVSDFRKDFQFYKVREINNYHHAHDAYLNAVVGTALIKKYPKLESEFVYGDYKVYDVRKMIAKSEQEIGKATAKYFFYSNIMNFFKTEITLANGEIRKRPLIETNGETGEIVWDKGRDFATVRKVLSMPQVNIVKKTEIQTVGQNGGLFDDNPKSPLEVTPSKLVPLKKELNPKKYGGYQKPTTAYPVLLITDTKQLIPISVMNKKQFEQNPVKFLRDRGYQQVGKNDFIKLPKYTLVDIGDGIKRLWASSKEIHKGNQLVVSKKSQILLYHAHHLDSDLSNDYLQNHNQQFDVLFNEIISFSKKCKLGKEHIQKIENVYSNKKNSASIEELAESFIKLLGFTQLGATSPFNFLGVKLNQKQYKGKKDYILPCTEGTLIRQSITGLYETRVDLSKIGED

SEQ ID NO: 238 - protein, 1410 aa, synthetic construct
  REGION 1..1410: note = CP5 polypeptide sequence
  REGION 1..341: note = MISC_FEATURE - Sequence derived from Cas9
  REGION 342..362: note = MISC_FEATURE - Linker sequence
  REGION 363..1388: note = MISC_FEATURE - Sequence derived from Cas9
  REGION 1389..1410: note = MISC_FEATURE - Bipartite nuclear localization sequence
EIGKATAKYFFYSNIMNFFKTEITLANGEIRKRPLIETNGETGEIVWDKGRDFATVRKVLSMPQVNIVKKTEVQTGGFSKESILPKRNSDKLIARKKDWDPKKYGGFMQPTVAYSVLVVAKVEKGKSKKLKSVKELLGITIMERSSFEKNPIDFLEAKGYKEVKKDLIIKLPKYSLFELENGRKRMLASAKFLQKGNELALPSKYVNFLYLASHYEKLKGSPEDNEQKQLFVEQHKHYLDEIIEQISEFSKRVILADANLDKVLSAYNKHRDKPIREQAENIIHLFTLTNLGAPRAFKYFDTTIARKEYRSTKEVLDATLIHQSITGLYETRIDLSQLGGDGGSGGSGGSGGSGGSGGSGGMDKKYSIGLAIGTNSVGWAVITDEYKVPSKKFKVLGNTDRHSIKKNLIGALLFDSGETAEATRLKRTARRRYTRRKNRICYLQEIFSNEMAKVDDSFFHRLEESFLVEEDKKHERHPIFGNIVDEVAYHEKYPTIYHLRKKLVDSTDKADLRLIYLALAHMIKFRGHFLIEGDLNPDNSDVDKLFIQLVQTYNQLFEENPINASGVDAKAILSARLSKSRRLENLIAQLPGEKKNGLFGNLIALSLGLTPNFKSNFDLAEDAKLQLSKDTYDDDLDNLLAQIGDQYADLFLAAKNLSDAILLSDILRVNTEITKAPLSASMIKRYDEHHQDLTLLKALVRQQLPEKYKEIFFDQSKNGYAGYIDGGASQEEFYKFIKPILEKMDGTEELLVKLNREDLLRKQRTFDNGSIPHQIHLGELHAILRRQEDFYPFLKDNREKIEKILTFRIPYYVGPLARGNSRFAWMTRKSEETITPWNFEEVVDKGASAQSFIERMTNFDKNLPNEKVLPKHSLLYEYFTVYNELTKVKYVTEGMRKPAFLSGEQKKAIVDLLFKTNRKVTVKQLKEDYFKKIECFDSVEISGVEDRFNASLGTYHDLLKIIKDKDFLDNEENEDILEDIVLTLTLFEDREMIEERLKTYAHLFDDKVMKQLKRRRYTGWGRLSRKLINGIRDKQSGKTILDFLKSDGFANRNFMQLIHDDSLTFKEDIQKAQVSGQGDSLHEHIANLAGSPAIKKGILQTVKVVDELVKVMGRHKPENIVIEMARENQTTQKGQKNSRERMKRIEEGIKELGSQILKEHPVENTQLQNEKLYLYYLQNGRDMYVDQELDINRLSDYDVDHIVPQSFLKDDSIDNKVLTRSDKNRGKSDNVPSEEVVKKMKNYWRQLLNAKLITQRKFDNLTKAERGGLSELDKAGFIKRQLVETRQITKHVAQILDSRMNTKYDENDKLIREVKVITLKSKLVSDFRKDFQFYKVREINNYHHAHDAYLNAVVGTALIKKYPKLESEFVYGDYKVYDVRKMIAKSEQEGADKRTADGSEFESPKKKRKV

SEQ ID NO: 239 - protein, 1302 aa, synthetic construct
  REGION 1..1302: note = Cas12c1 polypeptide sequence
MQTKKTHLHLISAKASRKYRRTIACLSDTAKKDLERRKQSGAADPAQELSCLKTIKFKLEVPEGSKLPSFDRISQIYNALETIEKGSLSYLLFALILSGFRIFPNSSAAKTFASSSCYKNDQFASQIKEIFGEMVKNFIPSELESILKKGRRKNNKDWTEENIKRVLNSEFGRKNSEGSSALFDSFLSKFSQELFRKFDSWNEVNKKYLEAAELLDSMLASYGPFDSVCKMIGDSDSRNSLPDKSTIAFTNNAEITVDIESSVMPYMAIAALLREYRQSKSKAAPVAYVQSHLTTTNGNGLSWFFKFGLDLIRKAPVSSKQSTSDGSKSLQELFSVPDDKLDGLKFIKEACEALPEASLLCGEKGELLGYQDFRTSFAGHIDSWVANYVNRLFELIELVNQLPESIKLPSILTQKNHNLVASLGLQEAEVSHSLELFEGLVKNVRQTLKKLAGIDISSSPNEQDIKEFYAFSDVLNRLGSIRNQIENAVQTAKKDKIDLESAIEWKEWKKLKKLPKLNGLGGGVPKQQELLDKALESVKQIRHYQRIDFERVIQWAVNEHCLETVPKFLVDAEKKKINKESSTDFAAKENAVRFLLEGIGAAARGKTDSVSKAAYNWFVVNNFLAKKDLNRYFINCQGCIYKPPYSKRRSLAFALRSDNKDTIEVVWEKFETFYKEISKEIEKFNIFSQEFQTFLHLENLRMKLLLRRIQKPIPAEIAFFSLPQEYYDSLPPNVAFLALNQEITPSEYITQFNLYSSFLNGNLILLRRSRSYLRAKFSWVGNSKLIYAAKEARLWKIPNAYWKSDEWKMILDSNVLVFDKAGNVLPAPTLKKVCEREGDLRLFYPLLRQLPHDWCYRNPFVKSVGREKNVIEVNKEGEPKVASALPGSLFRLIGPAPFKSLLDDCFFNPLDKDLRECMLIVDQEISQKVEAQKVEASLESCTYSIAVPIRYHLEEPKVSNQFENVLAIDQGEAGLAYAVFSLKSIGEAETKPIAVGTIRIPSIRRLIHSVSTYRKKKQRLQNFKQNYDSTAFIMRENVTGDVCAKIVGLMKEFNAFPVLEYDVKNLESGSRQLSAVYKAVNSHFLYFKEPGRDALRKQLWYGGDSWTIDGIEIVTRERKEDGKEGVEKIVPLKVFPGRSVSARFTSKTCSCCGRNVFDWLFTEKKAKTNKKFNVNSKGELTTADGVIQLFEADRSKGPKFYARRKERTPLTKPIAKGSYSLEEIERRVRTNLRRAPKSKQSRDTSQSQYFCVYKDCALHFSGMQADENAAINIGRRFLTALRKNRRSDFPSNVKISDRLLDN

SEQ ID NO: 240 - protein, 1218 aa, synthetic construct
  REGION 1..1218: note = Cas12c2 polypeptide sequence
MTKHSIPLHAFRNSGADARKWKGRIALLAKRGKETMRTLQFPLEMSEPEAAAINTTPFAVAYNAIEGTGKGTLFDYWAKLHLAGFRFFPSGGAATIFRQQAVFEDASWNAAFCQQSGKDWPWLVPSKLYERFTKAPREVAKKDGSKKSIEFTQENVANESHVSLVGASITDKTPEDQKEFFLKMAGALAEKFDSWKSANEDRIVAMKVIDEFLKSEGLHLPSLENIAVKCSVETKPDNATVAWHDAPMSGVQNLAIGVFATCASRIDNIYDLNGGKLSKLIQESATTPNVTALSWLFGKGLEYFRTTDIDTIMQDFNIPASAKESIKPLVESAQAIPTMTVLGKKNYAPFRPNFGGKIDSWIANYASRLMLLNDILEQIEPGFELPQALLDNETLMSGIDMTGDELKELIEAVYAWVDAAKQGLATLLGRGGNVDDAVQTFEQFSAMMDTLNGTLNTISARYVRAVEMAGKDEARLEKLIECKFDIPKWCKSVPKLVGISGGLPKVEEEIKVMNAAFKDVRARMFVRFEEIAAYVASKGAGMDVYDALEKRELEQIKKLKSAVPERAHIQAYRAVLHRIGRAVQNCSEKTKQLFSSKVIEMGVFKNPSHLNNFIFNQKGAIYRSPFDRSRHAPYQLHADKLLKNDWLELLAEISATLMASESTEQMEDALRLERTRLQLQLSGLPDWEYPASLAKPDIEVEIQTALKMQLAKDTVTSDVLQRAFNLYSSVLSGLTFKLLRRSFSLKMRFSVADTTQLIYVPKVCDWAIPKQYLQAEGEIGIAARVVTESSPAKMVTEVEMKEPKALGHFMQQAPHDWYFDASLGGTQVAGRIVEKGKEVGKERKLVGYRMRGNSAYKTVLDKSLVGNTELSQCSMIIEIPYTQTVDADFRAQVQAGLPKVSINLPVKETITASNKDEQMLFDRFVAIDLGERGLGYAVFDAKTLELQESGHRPIKAITNLLNRTHHYEQRPNQRQKFQAKFNVNLSELRENTVGDVCHQINRICAYYNAFPVLEYMVPDRLDKQLKSVYESVTNRYIWSSTDAHKSARVQFWLGGETWEHPYLKSAKDKKPLVLSPGRGASGKGTSQTCSCCGRNPFDLIKDMKPRAKIAVVDGKAKLENSELKLFERNLESKDDMLARRHRNERAGMEQPLTPGNYTVDEIKALLRANLRRAPKNRRTKDTTVSEYHCVFSDCGKTMHADENAAVNIGGKFIADIEK

SEQ ID NO: 241 - protein, 1252 aa, Oleiphilus sp.
  REGION 1..1252: note = MISC_FEATURE - OspCas12c polypeptide sequence
MTKLRHRQKKLTHDWAGSKKREVLGSNGKLQNPLLMPVKKGQVTEFRKAFSAYARATKGEMTDGRKNMFTHSFEPFKTKPSLHQCELADKAYQSLHSYLPGSLAHFLLSAHALGFRIFSKSGEATAFQASSKIEAYESKLASELACVDLSIQNLTISTLFNALTTSVRGKGEETSADPLIARFYTLLTGKPLSRDTQGPERDLAEVISRKIASSFGTWKEMTANPLQSLQFFEEELHALDANVSLSPAFDVLIKMNDLQGDLKNRTIVFDPDAPVFEYNAEDPADIIIKLTARYAKEAVIKNQNVGNYVKNAITTTNANGLGWLLNKGLSLLPVSTDDELLEFIGVERSHPSCHALIELIAQLEAPELFEKNVFSDTRSEVQGMIDSAVSNHIARLSSSRNSLSMDSEELERLIKSFQIHTPHCSLFIGAQSLSQQLESLPEALQSGVNSADILLGSTQYMLTNSLVEESIATYQRTLNRINYLSGVAGQINGAIKRKAIDGEKIHLPAAWSELISLPFIGQPVIDVESDLAHLKNQYQTLSNEFDTLISALQKNFDLNFNKALLNRTQHFEAMCRSTKKNALSKPEIVSYRDLLARLTSCLYRGSLVLRRAGIEVLKKHKIFESNSELREHVHERKHFVFVSPLDRKAKKLLRLTDSRPDLLHVIDEILQHDNLENKDRESLWLVRSGYLLAGLPDQLSSSFINLPIITQKGDRRLIDLIQYDQINRDAFVMLVTSAFKSNLSGLQYRANKQSFVVTRTLSPYLGSKLVYVPKDKDWLVPSQMFEGRFADILQSDYMVWKDAGRLCVIDTAKHLSNIKKSVFSSEEVLAFLRELPHRTFIQTEVRGLGVNVDGIAFNNGDIPSLKTFSNCVQVKVSRTNTSLVQTLNRWFEGGKVSPPSIQFERAYYKKDDQIHEDAAKRKIRFQMPATELVHASDDAGWTPSYLLGIDPGEYGMGLSLVSINNGEVLDSGFIHINSLINFASKKSNHQTKVVPRQQYKSPYANYLEQSKDSAAGDIAHILDRLIYKLNALPVFEALSGNSQSAADQVWTKVLSFYTWGDNDAQNSIRKQHWFGASHWDIKGMLRQPPTEKKPKPYIAFPGSQVSSYGNSQRCSCCGRNPIEQLREMAKDTSIKELKIRNSEIQLFDGTIKLFNPDPSTVIERRRHNLGPSRIPVADRTFKNISPSSLEFKELITIVSRSIRHSPEFIAKKRGIGSEYFCAYSDCNSSLNSEANAAANVAQKFQKQLFFEL

SEQ ID NO: 242 - protein, 767 aa, synthetic construct
  REGION 1..767: note = Cas12g1 polypeptide sequence
MAQASSTPAVSPRPRPRYREERTLVRKLLPRPGQSKQEFRENVKKLRKAFLQFNADVSGVCQWAIQFRPRYGKPAEPTETFWKFFLEPETSLPPNDSRSPEFRRLQAFEAAAGINGAAALDDPAFTNELRDSILAVASRPKTKEAQRLFSRLKDYQPAHRMILAKVAAEWIESRYRRAHQNWERNYEEWKKEKQEWEQNHPELTPEIREAFNQIFQQLEVKEKRVRICPAARLLQNKDNCQYAGKNKHSVLCNQFNEFKKNHLQGKAIKFFYKDAEKYLRCGLQSLKPNVQGPFREDWNKYLRYMNLKEETLRGKNGGRLPHCKNLGQECEFNPHTALCKQYQQQLSSRPDLVQHDELYRKWRREYWREPRKPVFRYPSVKRHSIAKIFGENYFQADFKNSVVGLRLDSMPAGQYLEFAFAPWPRNYRPQPGETEISSVHLHFVGTRPRIGFRFRVPHKRSRFDCTQEELDELRSRTFPRKAQDQKFLEAARKRLLETFPGNAEQELRLLAVDLGTDSARAAFFIGKTFQQAFPLKIVKIEKLYEQWPNQKQAGDRRDASSKQPRPGLSRDHVGRHLQKMRAQASEIAQKRQELTGTPAPETTTDQAAKKATLQPFDLRGLTVHTARMIRDWARLNARQIIQLAEENQVDLIVLESLRGFRPPGYENLDQEKKRRVAFFAHGRIRRKVTEKAVERGMRVVTVPYLASSKVCAECRKKQKDNKQWEKNKKRGLFKCEGCGSQAQVDENAARVLGRVFWGEIELPTAIP

SEQ ID NO: 243 - protein, 870 aa, synthetic construct
  REGION 1..870: note = Cas12h1 polypeptide sequence
MKVHEIPRSQLLKIKQYEGSFVEWYRDLQEDRKKFASLLFRWAAFGYAAREDDGATYISPSQALLERRLLLGDAEDVAIKFLDVLFKGGAPSSSCYSLFYEDFALRDKAKYSGAKREFIEGLATMPLDKIIERIRQDEQLSKIPAEEWLILGAEYSPEEIWEQVAPRIVNVDRSLGKQLRERLGIKCRRPHDAGYCKILMEVVARQLRSHNETYHEYLNQTHEMKTKVANNLTNEFDLVCEFAEVLEEKNYGLGWYVLWQGVKQALKEQKKPTKIQIAVDQLRQPKFAGLLTAKWRALKGAYDTWKLKKRLEKRKAFPYMPNWDNDYQIPVGLTGLGVFTLEVKRTEVVVDLKEHGKLFCSHSHYFGDLTAEKHPSRYHLKFRHKLKLRKRDSRVEPTIGPWIEAALREITIQKKPNGVFYLGLPYALSHGIDNFQIAKRFFSAAKPDKEVINGLPSEMVVGAADLNLSNIVAPVKARIGKGLEGPLHALDYGYGELIDGPKILTPDGPRCGELISLKRDIVEIKSAIKEFKACQREGLTMSEETTTWLSEVESPSDSPRCMIQSRIADTSRRLNSFKYQMNKEGYQDLAEALRLLDAMDSYNSLLESYQRMHLSPGEQSPKEAKFDTKRASFRDLLRRRVAHTIVEYFDDCDIVFFEDLDGPSDSDSRNNALVKLLSPRTLLLYIRQALEKRGIGMVEVAKDGTSQNNPISGHVGWRNKQNKSEIYFYEDKELLVMDADEVGAMNILCRGLNHSVCPYSFVTKAPEKKNDEKKEGDYGKRVKRFLKDRYGSSNVRFLVASMGFVTVTTKRPKDALVGKRLYYHGGELVTHDLHNRMKDEIKYLVEKEVLARRVSLSDSTIKSYKSFAHV

SEQ ID NO: 244 - protein, 1093 aa, synthetic construct
  REGION 1..1093: note = Cas12i1 polypeptide sequence
MSNKEKNASETRKAYTTKMIPRSHDRMKLLGNFMDYLMDGTPIFFELWNQFGGGIDRDIISGTANKDKISDDLLLAVNWFKVMPINSKPQGVSPSNLANLFQQYSGSEPDIQAQEYFASNFDTEKHQWKDMRVEYERLLAELQLSRSDMHHDLKLMYKEKCIGLSLSTAHYITSVMFGTGAKNNRQTKHQFYSKVIQLLEESTQINSVEQLASIILKAGDCDSYRKLRIRCSRKGATPSILKIVQDYELGTNHDDEVNVPSLIANLKEKLGRFEYECEWKCMEKIKAFLASKVGPYYLGSYSAMLENALSPIKGMTTKNCKFVLKQIDAKNDIKYENEPFGKIVEGFFDSPYFESDTNVKWVLHPHHIGESNIKTLWEDLNAIHSKYEEDIASLSEDKKEKRIKVYQGDVCQTINTYCEEVGKEAKTPLVQLLRYLYSRKDDIAVDKIIDGITFLSKKHKVEKQKINPVIQKYPSFNFGNNSKLLGKIISPKDKLKHNLKCNRNQVDNYIWIEIKVLNTKTMRWEKHHYALSSTRFLEEVYYPATSENPPDALAARFRTKTNGYEGKPALSAEQIEQIRSAPVGLRKVKKRQMRLEAARQQNLLPRYTWGKDFNINICKRGNNFEVTLATKVKKKKEKNYKVVLGYDANIVRKNTYAAIEAHANGDGVIDYNDLPVKPIESGFVTVESQVRDKSYDQLSYNGVKLLYCKPHVESRRSFLEKYRNGTMKDNRGNNIQIDFMKDFEAIADDETSLYYFNMKYCKLLQSSIRNHSSQAKEYREEIFELLRDGKLSVLKLSSLSNLSFVMFKVAKSLIGTYFGHLLKKPKNSKSDVKAPPITDEDKQKADPEMFALRLALEEKRLNKVKSKKEVIANKIVAKALELRDKYGPVLIKGENISDTTKKGKKSSTNSFLMDWLARGVANKVKEMVMMHQGLEFVEVNPNFTSHQDPFVHKNPENTFRARYSRCTPSELTEKNRKEILSFLSDKPSKRPTNAYYNEGAMAFLATYGLKKNDVLGVSLEKFKQIMANILHQRSEDQLLFPSRGGMFYLATYKLDADATSVNWNGKQFWVCNADLVAAYNVGLVDIQKDFKKK

SEQ ID NO: 245 - protein, 1054 aa, synthetic construct
  REGION 1..1054: note = Cas12i2 polypeptide sequence
MSSAIKSYKSVLRPNERKNQLLKSTIQCLEDGSAFFFKMLQGLFGGITPEIVRFSTEQEKQQQDIALWCAVNWFRPVSQDSLTHTIASDNLVEKFEEYYGGTASDAIKQYFSASIGESYYWNDCRQQYYDLCRELGVEVSDLTHDLEILCREKCLAVATESNQNNSIISVLFGTGEKEDRSVKLRITKKILEAISNLKEIPKNVAPIQEIILNVAKATKETFRQVYAGNLGAPSTLEKFIAKDGQKEFDLKKLQTDLKKVIRGKSKERDWCCQEELRSYVEQNTIQYDLWAWGEMFNKAHTALKIKSTRNYNFAKQRLEQFKEIQSLNNLLVVKKLNDFFDSEFFSGEETYTICVHHLGGKDLSKLYKAWEDDPADPENAIVVLCDDLKNNFKKEPIRNILRYIFTIRQECSAQDILAAAKYNQQLDRYKSQKANPSVLGNQGFTWTNAVILPEKAQRNDRPNSLDLRIWLYLKLRHPDGRWKKHHIPFYDTRFFQEIYAAGNSPVDTCQFRTPRFGYHLPKLTDQTAIRVNKKHVKAAKTEARIRLAIQQGTLPVSNLKITEISATINSKGQVRIPVKFDVGRQKGTLQIGDRFCGYDQNQTASHAYSLWEVVKEGQYHKELGCFVRFISSGDIVSITENRGNQFDQLSYEGLAYPQYADWRKKASKFVSLWQITKKNKKKEIVTVEAKEKFDAICKYQPRLYKFNKEYAYLLRDIVRGKSLVELQQIRQEIFRFIEQDCGVTRLGSLSLSTLETVKAVKGIIYSYFSTALNASKNNPISDEQRKEFDPELFALLEKLELIRTRKKKQKVERIANSLIQTCLENNIKFIRGEGDLSTTNNATKKKANSRSMDWLARGVFNKIRQLAPMHNITLFGCGSLYTSHQDPLVHRNPDKAMKCRWAAIPVKDIGDWVLRKLSQNLRAKNIGTGEYYHQGVKEFLSHYELQDLEEELLKWRSDRKSNIPCWVLQNRLAEKLGNKEAVVYIPVRGGRIYFATHKVATGAVSIVFDQKQVWVCNADHVAAANIALTVKGIGEQSSDEENPDGSRIKLQLTS

SEQ ID NO: 246 - protein, 4 aa, synthetic construct
  REGION 1..4: note = synthetic peptide sequence
GGGS

SEQ ID NO: 247 - protein, 5 aa, synthetic construct
  REGION 1..5: note = synthetic peptide sequence
GGGGS

SEQ ID NO: 248 - protein, 5 aa, synthetic construct
  REGION 1..5: note = synthetic peptide sequence
EAAAK

SEQ ID NO: 249 - protein, 16 aa, synthetic construct
  REGION 1..16: note = synthetic peptide sequence
SGSETPGTSESATPES

SEQ ID NO: 250 - protein, 6 aa, synthetic construct
  REGION 1..6: note = linker peptide sequence
GGSGGS

SEQ ID NO: 251 - protein, 20 aa, synthetic construct
  REGION 1..20: note = synthetic peptide sequence
GSSGSETPGTSESATPESSG

SEQ ID NO: 252 - DNA, 18 bp, synthetic construct
  misc_feature 1..18: note = synthetic oligonucleotide sequence
  source 1..18: mol_type = other DNA
ggaggctctggaggaagc

SEQ ID NO: 253 - DNA, 60 bp, synthetic construct
  misc_feature 1..60: note = synthetic oligonucleotide sequence
  source 1..60: mol_type = other DNA
ggctcttctggatctgaaacacctggcacaagcgagagcgccacccctgagagctctggc

SEQ ID NO: 254 - protein, 1129 aa, Alicyclobacillus acidiphilus
  REGION 1..1129: note = MISC_FEATURE - AacCas12b polypeptide sequence
MAVKSMKVKLRLDNMPEIRAGLWKLHTEVNAGVRYYTEWLSLLRQENLYRRSPNGDGEQECYKTAEECKAELLERLRARQVENGHCGPAGSDDELLQLARQLYELLVPQAIGAKGDAQQIARKFLSPLADKDAVGGLGIAKAGNKPRWVRMREAGEPGWEEEKAKAEARKSTDRTADVLRALADFGLKPLMRVYTDSDMSSVQWKPLRKGQAVRTWDRDMFQQAIERMMSWESWNQRVGEAYAKLVEQKSRFEQKNFVGQEHLVQLVNQLQQDMKEASHGLESKEQTAHYLTGRALRGSDKVFEKWEKLDPDAPFDLYDTEIKNVQRRNTRRFGSHDLFAKLAEPKYQALWREDASFLTRYAVYNSIVRKLNHAKMFATFTLPDATAHPIWTRFDKLGGNLHQYTFLFNEFGEGRHAIRFQKLLTVEDGVAKEVDDVTVPISMSAQLDDLLPRDPHELVALYFQDYGAEQHLAGEFGGAKIQYRRDQLNHLHARRGARDVYLNLSVRVQSQSEARGERRPPYAAVFRLVGDNHRAFVHFDKLSDYLAEHPDDGKLGSEGLLSGLRVMSVDLGLRTSASISVFRVARKDELKPNSEGRVPFCFPIEGNENLVAVHERSQLLKLPGETESKDLRAIREERQRTLRQLRTQLAYLRLLVRCGSEDVGRRERSWAKLIEQPMDANQMTPDWREAFEDELQKLKSLYGICGDREWTEAVYESVRRVWRHMGKQVRDWRKDVRSGERPKIRGYQKDVVGGNSIEQIEYLERQYKFLKSWSFFGKVSGQVIRAEKGSRFAITLREHIDHAKEDRLKKLADRIIMEALGYVYALDDERGKGKWVAKYPPCQLILLEELSEYQFNNDRPPSENNQLMQWSHRGVFQELLNQAQVHDLLVGTMYAAFSSRFDARTGAPGIRCRRVPARCAREQNPEPFPWWLNKFVAEHKLDGCPLRADDLIPTGEGEFFVSPFSAEEGDFHQIHADLNAAQNLQRRLWSDFDISQIRLRCDWGEVDGEPVLIPRTTGKRTADSYGNKVFYTKTGVTYYERERGKKRRKVFAQEELSEEEAELLVEADEAREKSVVLMRDPSGIINRGDWTRQKEFWSMVNQRIEGYLVKQIRSRVRLQESACENTGDI

SEQ ID NO: 255 - protein, 1140 aa, Bacillus hisashii
  REGION 1..1140: note = MISC_FEATURE - BhCas12b polypeptide sequence
MAPKKKRKVGIHGVPAAATRSFILKIEPNEEVKKGLWKTHEVLNHGIAYYMNILKLIRQEAIYEHHEQDPKNPKKVSKAEIQAELWDFVLKMQKCNSFTHEVDKDEVFNILRELYEELVPSSVEKKGEANQLSNKFLYPLVDPNSQSGKGTASSGRKPRWYNLKIAGDPSWEEEKKKWEEDKKKDPLAKILGKLAEYGLIPLFIPYTDSNEPIVKEIKWMEKSRNQSVRRLDKDMFIQALERFLSWESWNLKVKEEYEKVEKEYKTLEERIKEDIQALKALEQYEKERQEQLLRDTLNTNEYRLSKRGLRGWREIIQKWLKMDENEPSEKYLEVFKDYQRKHPREAGDYSVYEFLSKKENHFIWRNHPEYPYLYATFCEIDKKKKDAKQQATFTLADPINHPLWVRFEERSGSNLNKYRILTEQLHTEKLKKKLTVQLDRLIYPTESGGWEEKGKVDIVLLPSRQFYNQIFLDIEEKGKHAFTYKDESIKFPLKGTLGGARVQFDRDHLRRYPHKVESGNVGRIYFNMTVNIEPTESPVSKSLKIHRDDFPKVVNFKPKELTEWIKDSKGKKLKSGIESLEIGLRVMSIDLGQRQAAAASIFEVVDQKPDIEGKLFFPIKGTELYAVHRASFNIKLPGETLVKSREVLRKAREDNLKLMNQKLNFLRNVLHFQQFEDITEREKRVTKWISRQENSDVPLVYQDELIQIRELMYKPYKDWVAFLKQLHKRLEVEIGKEVKHWRKSLSDGRKGLYGISLKNIDEIDRTRKFLLRWSLRPTEPGEVRRLEPGQRFAIDQLNHLNALKEDRLKKMANTIIMHALGYCYDVRKKKWQAKNPACQIILFEDLSNYNPYEERSRFENSKLMKWSRREIPRQVALQGEIYGLQVGEVGAQFSSRFHAKTGSPGIRCSVVTKEKLQDNRFFKNLQREGRLTLDKIAVLKEGDLYPDKGGEKFISLSKDRKCVTTHADINAAQNLQKRFWTRTHGFYKVYCKAYQVDGQTVYIPESKDQKQKIIEEFGEGYFILKDGVYEWVNAGKLKIKKGSSKQSSSELVDSDILKDSFDLASELKGEKLMLYRDPSGNVFPSDKWMAAGVFFGKLERILISKLTNQYSISTIEDDSSKQSMKRPAATKKAGQAKKKK

SEQ ID NO: 256 - protein, 1108 aa, Bacillus thermoamylovorans
  REGION 1..1108: note = MISC_FEATURE - BTCas12b polypeptide sequence
MATRSFILKIEPNEEVKKGLWKTHEVLNHGIAYYMNILKLIRQEAIYEHHEQDPKNPKKVSKAEIQAELWDFVLKMQKCNSFTHEVDKDVVFNILRELYEELVPSSVEKKGEANQLSNKFLYPLVDPNSQSGKGTASSGRKPRWYNLKIAGDPSWEEEKKKWEEDKKKDPLAKILGKLAEYGLIPLFIPFTDSNEPIVKEIKWMEKSRNQSVRRLDKDMFIQALERFLSWESWNLKVKEEYEKVEKEHKTLEERIKEDIQAFKSLEQYEKERQEQLLRDTLNTNEYRLSKRGLRGWREIIQKWLKMDENEPSEKYLEVFKDYQRKHPREAGDYSVYEFLSKKENHFIWRNHPEYPYLYATFCEIDKKKKDAKQQATFTLADPINHPLWVRFEERSGSNLNKYRILTEQLHTEKLKKKLTVQLDRLIYPTESGGWEEKGKVDIVLLPSRQFYNQIFLDIEEKGKHAFTYKDESIKFPLKGTLGGARVQFDRDHLRRYPHKVESGNVGRIYFNMTVNIEPTESPVSKSLKIHRDDFPKFVNFKPKELTEWIKDSKGKKLKSGIESLEIGLRVMSIDLGQRQAAAASIFEVVDQKPDIEGKLFFPIKGTELYAVHRASFNIKLPGETLVKSREVLRKAREDNLKLMNQKLNFLRNVLHFQQFEDITEREKRVTKWISRQENSDVPLVYQDELIQIRELMYKPYKDWVAFLKQLHKRLEVEIGKEVKHWRKSLSDGRKGLYGISLKNIDEIDRTRKFLLRWSLRPTEPGEVRRLEPGQRFAIDQLNHLNALKEDRLKKMANTIIMHALGYCYDVRKKKWQAKNPACQIILFEDLSNYNPYEERSRFENSKLMKWSRREIPRQVALQGEIYGLQVGEVGAQFSSRFHAKTGSPGIRCSVVTKEKLQDNRFFKNLQREGRLTLDKIAVLKEGDLYPDKGGEKFISLSKDRKLVTTHADINAAQNLQKRFWTRTHGFYKVYCKAYQVDGQTVYIPESKDQKQKIIEEFGEGYFILKDGVYEWGNAGKLKIKKGSSKQSSSELVDSDILKDSFDLASELKGEKLMLYRDPSGNVFPSDKWMAAGVFFGKLERILISKLTNQYSISTIEDDSSKQSM

SEQ ID NO: 257 - protein, 1112 aa, Bacillus sp.
  REGION 1..1112: note = MISC_FEATURE - BvCas12b (Bacillus sp. V3-13) polypeptide sequence
MAIRSIKLKMKTNSGTDSIYLRKALWRTHQLINEGIAYYMNLLTLYRQEAIGDKTKEAYQAELINIIRNQQRNNGSSEEHGSDQEILALLRQLYELIIPSSIGESGDANQLGNKFLYPLVDPNSQSGKGTSNAGRKPRWKRLKEEGNPDWELEKKKDEERKAKDPTVKIFDNLNKYGLLPLFPLFTNIQKDIEWLPLGKRQSVRKWDKDMFIQAIERLLSWESWNRRVADEYKQLKEKTESYYKEHLTGGEEWIEKIRKFEKERNMELEKNAFAPNDGYFITSRQIRGWDRVYEKWSKLPESASPEELWKVVAEQQNKMSEGFGDPKVFSFLANRENRDIWRGHSERIYHIAAYNGLQKKLSRTKEQATFTLPDAIEHPLWIRYESPGGTNLNLFKLEEKQKKNYYVTLSKIIWPSEEKWIEKENIEIPLAPSIQFNRQIKLKQHVKGKQEISFSDYSSRISLDGVLGGSRIQFNRKYIKNHKELLGEGDIGPVFFNLVVDVAPLQETRNGRLQSPIGKALKVISSDFSKVIDYKPKELMDWMNTGSASNSFGVASLLEGMRVMSIDMGQRTSASVSIFEVVKELPKDQEQKLFYSINDTELFAIHKRSFLLNLPGEVVTKNNKQQRQERRKKRQFVRSQIRMLANVLRLETKKTPDERKKAIHKLMEIVQSYDSWTASQKEVWEKELNLLTNMAAFNDEIWKESLVELHHRIEPYVGQIVSKWRKGLSEGRKNLAGISMWNIDELEDTRRLLISWSKRSRTPGEANRIETDEPFGSSLLQHIQNVKDDRLKQMANLIIMTALGFKYDKEEKDRYKRWKETYPACQIILFENLNRYLFNLDRSRRENSRLMKWAHRSIPRTVSMQGEMFGLQVGDVRSEYSSRFHAKTGAPGIRCHALTEEDLKAGSNTLKRLIEDGFINESELAYLKKGDIIPSQGGELFVTLSKRYKKDSDNNELTVIHADINAAQNLQKRFWQQNSEVYRVPCQLARMGEDKLYIPKSQTETIKKYFGKGSFVKNNTEQEVYKWEKSEKMKIKTDTTFDLQDLDGFEDISKTIELAQEQQKKYLTMFRDPSGYFFNNETWRPQKEYWSIVNNIIKSCLKKKILSNKVEL

SEQ ID NO: 258 - DNA, 47 bp, synthetic construct
  misc_feature 1..47: note = 5'UTR oligonucleotide sequence
  source 1..47: mol_type = other DNA
gggaaataagagagaaaagaagagtaagaagaaatataagagccacc

SEQ ID NO: 259 - DNA, 101 bp, synthetic construct
  misc_feature 1..101: note = 3'UTR (TriLink standard UTR)polynucleotide sequence
  source 1..101: mol_type = other DNA
gctggagcctcggtggccatgcttcttgccccttgggcctccccccagcccctcctccccttcctgcacccgtacccccgtggtctttgaataaagtctga

SEQ ID NO: 260 - DNA, 3420 bp, Bacillus hisashii
  misc_feature 1..3420: note = bhCas12b (V4) polynucleotide sequence
  source 1..3420: mol_type = genomic DNA
atggccccaaagaagaagcggaaggtcggtatccacggagtcccagcagccgccaccagatccttcatcctgaagatcgagcccaacgaggaagtgaagaaaggcctctggaaaacccacgaggtgctgaaccacggaatcgcctactacatgaatatcctgaagctgatccggcaagaggccatctacgagcaccacgagcaggaccccaagaatcccaagaaggtgtccaaggccgagatccaggccgagctgtgggatttcgtgctgaagatgcagaagtgcaacagcttcacacacgaggtggacaaggacgaggtgttcaacatcctgagagagctgtacgaggaactggtgcccagcagcgtggaaaagaagggcgaagccaaccagctgagcaacaagtttctgtaccctctggtggaccccaacagccagtctggaaagggaacagccagcagcggcagaaagcccagatggtacaacctgaagattgccggcgatccctcctgggaagaagagaagaagaagtgggaagaagataagaaaaaggacccgctggccaagatcctgggcaagctggctgagtacggactgatccctctgttcatcccctacaccgacagcaacgagcccatcgtgaaagaaatcaagtggatggaaaagtcccggaaccagagcgtgcggcggctggataaggacatgttcattcaggccctggaacggttcctgagctgggagagctggaacctgaaagtgaaagaggaatacgagaaggtcgagaaagagtacaagaccctggaagagaggatcaaagaggacatccaggctctgaaggctctggaacagtatgagaaagagcggcaagaacagctgctgcgggacaccctgaacaccaacgagtaccggctgagcaagagaggccttagaggctggcgggaaatcatccagaaatggctgaaaatggacgagaacgagccctccgagaagtacctggaagtgttcaaggactaccagcggaagcaccctagagaggccggcgattacagcgtgtacgagttcctgtccaagaaagagaaccacttcatctggcggaatcaccctgagtacccctacctgtacgccaccttctgcgagatcgacaagaaaaagaaggacgccaagcagcaggccaccttcacactggccgatcctatcaatcaccctctgtgggtccgattcgaggaaagaagcggcagcaacctgaacaagtacagaatcctgaccgagcagctgcacaccgagaagctgaagaaaaagctgacagtgcagctggaccggctgatctaccctacagaatctggcggctgggaagagaagggcaaagtggacattgtgctgctgcccagccggcagttctacaaccagatcttcctggacatcgaggaaaagggcaagcacgccttcacctacaaggatgagagcatcaagttccctctgaagggcacactcggcggagccagagtgcagttcgacagagatcacctgagaagataccctcacaaggtggaaagcggcaacgtgggcagaatctacttcaacatgaccgtgaacatcgagcctacagagtccccagtgtccaagtctctgaagatccaccgggacgacttccccaaggtggtcaacttcaagcccaaagaactgaccgagtggatcaaggacagcaagggcaagaaactgaagtccggcatcgagtccctggaaatcggcctgagagtgatgagcatcgacctgggacagagacaggccgctgccgcctctattttcgaggtggtggatcagaagcccgacatcgaaggcaagctgtttttcccaatcaagggcaccgagctgtatgccgtgcacagagccagcttcaacatcaagctgcccggcgagacactggtcaagagcagagaagtgctgcggaaggccagagaggacaatctgaaactgatgaaccagaagctcaacttcctgcggaacgtgctgcacttccagcagttcgaggacatcaccgagagagagaagcgggtcaccaagtggatcagcagacaagagaacagcgacgtgcccctggtgtaccaggatgagctgatccagatccgcgagctgatgtacaagccttacaaggactgggtcgccttcctgaagcagctccacaagagactggaagtcgagatcggcaaagaagtgaagcactggcggaagtccctgagcgacggaagaaagggcctgtacggcatctccctgaagaacatcgacgagatcgatcggacccggaagttcctgctgagatggtccctgaggcctaccgaacctggcgaagtgcgtagactggaacccggccagagattcgccatcgaccagctgaatcacctgaacgccctgaaagaagatcggctgaagaagatggccaacaccatcatcatgcacgccctgggctactgctacgacgtgcggaagaagaaatggcaggctaagaaccccgcctgccagatcatcctgttcgaggatctgagcaactacaacccctacgaggaaaggtcccgcttcgagaacagcaagctcatgaagtggtccagacgcgagatccccagacaggttgcactgcagggcgagatctatggcctgcaagtgggagaagtgggcgctcagttcagcagcagattccacgccaagacaggcagccctggcatcagatgtagcgtcgtgaccaaagagaagctgcaggacaatcggttcttcaagaatctgcagagagagggcagactgaccctggacaaaatcgccgtgctgaaagagggcgatctgtacccagacaaaggcggcgagaagttcatcagcctgagcaaggatcggaagtgcgtgaccacacacgccgacatcaacgccgctcagaacctgcagaagcggttctggacaagaacccacggcttctacaaggtgtactgcaaggcctaccaggtggacggccagaccgtgtacatccctgagagcaaggaccagaagcagaagatcatcgaagagttcggcgagggctacttcattctgaaggacggggtgtacgaatgggtcaacgccggcaagctgaaaatcaagaagggcagctccaagcagagcagcagcgagctggtggatagcgacatcctgaaagacagcttcgacctggcctccgagctgaaaggcgaaaagctgatgctgtacagggaccccagcggcaatgtgttccccagcgacaaatggatggccgctggcgtgttcttcggaaagctggaacgcatcctgatcagcaagctgaccaaccagtactccatcagcaccatcgaggacgacagcagcaagcagtctatgaaaaggccggcggccacgaaaaaggccggccaggcaaaaaagaaaaag

SEQ ID NO: 261 - protein, 17 aa, synthetic construct
  REGION 1..17: note = synthetic peptide sequence
MAPKKKRKVGIHGVPAA

SEQ ID NO: 262 - DNA, 51 bp, synthetic construct
  misc_feature 1..51: note = synthetic oligonucleotide sequence
  source 1..51: mol_type = other DNA
atggccccaaagaagaagcggaaggtcggtatccacggagtcccagcagcc

SEQ ID NO: 263 - protein, 1554 aa, synthetic construct
  REGION 1..1554: note = 101 Cas9 TadAins 1015 polypeptide sequence
MDKKYSIGLAIGTNSVGWAVITDEYKVPSKKFKVLGNTDRHSIKKNLIGALLFDSGETAEATRLKRTARRRYTRRKNRICYLQEIFSNEMAKVDDSFFHRLEESFLVEEDKKHERHPIFGNIVDEVAYHEKYPTIYHLRKKLVDSTDKADLRLIYLALAHMIKFRGHFLIEGDLNPDNSDVDKLFIQLVQTYNQLFEENPINASGVDAKAILSARLSKSRRLENLIAQLPGEKKNGLFGNLIALSLGLTPNFKSNFDLAEDAKLQLSKDTYDDDLDNLLAQIGDQYADLFLAAKNLSDAILLSDILRVNTEITKAPLSASMIKRYDEHHQDLTLLKALVRQQLPEKYKEIFFDQSKNGYAGYIDGGASQEEFYKFIKPILEKMDGTEELLVKLNREDLLRKQRTFDNGSIPHQIHLGELHAILRRQEDFYPFLKDNREKIEKILTFRIPYYVGPLARGNSRFAWMTRKSEETITPWNFEEVVDKGASAQSFIERMTNFDKNLPNEKVLPKHSLLYEYFTVYNELTKVKYVTEGMRKPAFLSGEQKKAIVDLLFKTNRKVTVKQLKEDYFKKIECFDSVEISGVEDRFNASLGTYHDLLKIIKDKDFLDNEENEDILEDIVLTLTLFEDREMIEERLKTYAHLFDDKVMKQLKRRRYTGWGRLSRKLINGIRDKQSGKTILDFLKSDGFANRNFMQLIHDDSLTFKEDIQKAQVSGQGDSLHEHIANLAGSPAIKKGILQTVKVVDELVKVMGRHKPENIVIEMARENQTTQKGQKNSRERMKRIEEGIKELGSQILKEHPVENTQLQNEKLYLYYLQNGRDMYVDQELDINRLSDYDVDHIVPQSFLKDDSIDNKVLTRSDKNRGKSDNVPSEEVVKKMKNYWRQLLNAKLITQRKFDNLTKAERGGLSELDKAGFIKRQLVETRQITKHVAQILDSRMNTKYDENDKLIREVKVITLKSKLVSDFRKDFQFYKVREINNYHHAHDAYLNAVVGTALIKKYPKLESEFVYGDYKVGSSGSETPGTSESATPESSGSEVEFSHEYWMRHALTLAKRARDEREVPVGAVLVLNNRVIGEGWNRAIGLHDPTAHAEIMALRQGGLVMQNYRLIDATLYVTFEPCVMCAGAMIHSRIGRVVFGVRNAKTGAAGSLMDVLHYPGMNHRVEITEGILADECAALLCYFFRMPRQVFNAQKKAQSSTDYDVRKMIAKSEQEIGKATAKYFFYSNIMNFFKTEITLANGEIRKRPLIETNGETGEIVWDKGRDFATVRKVLSMPQVNIVKKTEVQTGGFSKESILPKRNSDKLIARKKDWDPKKYGGFDSPTVAYSVLVVAKVEKGKSKKLKSVKELLGITIMERSSFEKNPIDFLEAKGYKEVKKDLIIKLPKYSLFELENGRKRMLASAGELQKGNELALPSKYVNFLYLASHYEKLKGSPEDNEQKQLFVEQHKHYLDEIIEQISEFSKRVILADANLDKVLSAYNKHRDKPIREQAENIIHLFTLTNLGAPAAFKYFDTTIDRKRYTSTKEVLDATLIHQSITGLYETRIDLSQLGGD

SEQ ID NO: 264 - protein, 1554 aa, synthetic construct
  REGION 1..1554: note = 102 Cas9 TadAins 1022 polypeptide sequence
MDKKYSIGLAIGTNSVGWAVITDEYKVPSKKFKVLGNTDRHSIKKNLIGALLFDSGETAEATRLKRTARRRYTRRKNRICYLQEIFSNEMAKVDDSFFHRLEESFLVEEDKKHERHPIFGNIVDEVAYHEKYPTIYHLRKKLVDSTDKADLRLIYLALAHMIKFRGHFLIEGDLNPDNSDVDKLFIQLVQTYNQLFEENPINASGVDAKAILSARLSKSRRLENLIAQLPGEKKNGLFGNLIALSLGLTPNFKSNFDLAEDAKLQLSKDTYDDDLDNLLAQIGDQYADLFLAAKNLSDAILLSDILRVNTEITKAPLSASMIKRYDEHHQDLTLLKALVRQQLPEKYKEIFFDQSKNGYAGYIDGGASQEEFYKFIKPILEKMDGTEELLVKLNREDLLRKQRTFDNGSIPHQIHLGELHAILRRQEDFYPFLKDNREKIEKILTFRIPYYVGPLARGNSRFAWMTRKSEETITPWNFEEVVDKGASAQSFIERMTNFDKNLPNEKVLPKHSLLYEYFTVYNELTKVKYVTEGMRKPAFLSGEQKKAIVDLLFKTNRKVTVKQLKEDYFKKIECFDSVEISGVEDRFNASLGTYHDLLKIIKDKDFLDNEENEDILEDIVLTLTLFEDREMIEERLKTYAHLFDDKVMKQLKRRRYTGWGRLSRKLINGIRDKQSGKTILDFLKSDGFANRNFMQLIHDDSLTFKEDIQKAQVSGQGDSLHEHIANLAGSPAIKKGILQTVKVVDELVKVMGRHKPENIVIEMARENQTTQKGQKNSRERMKRIEEGIKELGSQILKEHPVENTQLQNEKLYLYYLQNGRDMYVDQELDINRLSDYDVDHIVPQSFLKDDSIDNKVLTRSDKNRGKSDNVPSEEVVKKMKNYWRQLLNAKLITQRKFDNLTKAERGGLSELDKAGFIKRQLVETRQITKHVAQILDSRMNTKYDENDKLIREVKVITLKSKLVSDFRKDFQFYKVREINNYHHAHDAYLNAVVGTALIKKYPKLESEFVYGDYKVYDVRKMIGSSGSETPGTSESATPESSGSEVEFSHEYWMRHALTLAKRARDEREVPVGAVLVLNNRVIGEGWNRAIGLHDPTAHAEIMALRQGGLVMQNYRLIDATLYVTFEPCVMCAGAMIHSRIGRVVFGVRNAKTGAAGSLMDVLHYPGMNHRVEITEGILADECAALLCYFFRMPRQVFNAQKKAQSSTDAKSEQEIGKATAKYFFYSNIMNFFKTEITLANGEIRKRPLIETNGETGEIVWDKGRDFATVRKVLSMPQVNIVKKTEVQTGGFSKESILPKRNSDKLIARKKDWDPKKYGGFDSPTVAYSVLVVAKVEKGKSKKLKSVKELLGITIMERSSFEKNPIDFLEAKGYKEVKKDLIIKLPKYSLFELENGRKRMLASAGELQKGNELALPSKYVNFLYLASHYEKLKGSPEDNEQKQLFVEQHKHYLDEIIEQISEFSKRVILADANLDKVLSAYNKHRDKPIREQAENIIHLFTLTNLGAPAAFKYFDTTIDRKRYTSTKEVLDATLIHQSITGLYETRIDLSQLGGD

SEQ ID NO: 265 - protein, 1554 aa, synthetic construct
  REGION 1..1554: note = 103 Cas9 TadAins 1029 polypeptide sequence
MDKKYSIGLAIGTNSVGWAVITDEYKVPSKKFKVLGNTDRHSIKKNLIGALLFDSGETAEATRLKRTARRRYTRRKNRICYLQEIFSNEMAKVDDSFFHRLEESFLVEEDKKHERHPIFGNIVDEVAYHEKYPTIYHLRKKLVDSTDKADLRLIYLALAHMIKFRGHFLIEGDLNPDNSDVDKLFIQLVQTYNQLFEENPINASGVDAKAILSARLSKSRRLENLIAQLPGEKKNGLFGNLIALSLGLTPNFKSNFDLAEDAKLQLSKDTYDDDLDNLLAQIGDQYADLFLAAKNLSDAILLSDILRVNTEITKAPLSASMIKRYDEHHQDLTLLKALVRQQLPEKYKEIFFDQSKNGYAGYIDGGASQEEFYKFIKPILEKMDGTEELLVKLNREDLLRKQRTFDNGSIPHQIHLGELHAILRRQEDFYPFLKDNREKIEKILTFRIPYYVGPLARGNSRFAWMTRKSEETITPWNFEEVVDKGASAQSFIERMTNFDKNLPNEKVLPKHSLLYEYFTVYNELTKVKYVTEGMRKPAFLSGEQKKAIVDLLFKTNRKVTVKQLKEDYFKKIECFDSVEISGVEDRFNASLGTYHDLLKIIKDKDFLDNEENEDILEDIVLTLTLFEDREMIEERLKTYAHLFDDKVMKQLKRRRYTGWGRLSRKLINGIRDKQSGKTILDFLKSDGFANRNFMQLIHDDSLTFKEDIQKAQVSGQGDSLHEHIANLAGSPAIKKGILQTVKVVDELVKVMGRHKPENIVIEMARENQTTQKGQKNSRERMKRIEEGIKELGSQILKEHPVENTQLQNEKLYLYYLQNGRDMYVDQELDINRLSDYDVDHIVPQSFLKDDSIDNKVLTRSDKNRGKSDNVPSEEVVKKMKNYWRQLLNAKLITQRKFDNLTKAERGGLSELDKAGFIKRQLVETRQITKHVAQILDSRMNTKYDENDKLIREVKVITLKSKLVSDFRKDFQFYKVREINNYHHAHDAYLNAVVGTALIKKYPKLESEFVYGDYKVYDVRKMIAKSEQEIGSSGSETPGTSESATPESSGSEVEFSHEYWMRHALTLAKRARDEREVPVGAVLVLNNRVIGEGWNRAIGLHDPTAHAEIMALRQGGLVMQNYRLIDATLYVTFEPCVMCAGAMIHSRIGRVVFGVRNAKTGAAGSLMDVLHYPGMNHRVEITEGILADECAALLCYFFRMPRQVFNAQKKAQSSTDGKATAKYFFYSNIMNFFKTEITLANGEIRKRPLIETNGETGEIVWDKGRDFATVRKVLSMPQVNIVKKTEVQTGGFSKESILPKRNSDKLIARKKDWDPKKYGGFDSPTVAYSVLVVAKVEKGKSKKLKSVKELLGITIMERSSFEKNPIDFLEAKGYKEVKKDLIIKLPKYSLFELENGRKRMLASAGELQKGNELALPSKYVNFLYLASHYEKLKGSPEDNEQKQLFVEQHKHYLDEIIEQISEFSKRVILADANLDKVLSAYNKHRDKPIREQAENIIHLFTLTNLGAPAAFKYFDTTIDRKRYTSTKEVLDATLIHQSITGLYETRIDLSQLGGD

SEQ ID NO: 266 - protein, 1554 aa, synthetic construct
  REGION 1..1554: note = 103 Cas9 TadAins 1040 polypeptide sequence
MDKKYSIGLAIGTNSVGWAVITDEYKVPSKKFKVLGNTDRHSIKKNLIGALLFDSGETAEATRLKRTARRRYTRRKNRICYLQEIFSNEMAKVDDSFFHRLEESFLVEEDKKHERHPIFGNIVDEVAYHEKYPTIYHLRKKLVDSTDKADLRLIYLALAHMIKFRGHFLIEGDLNPDNSDVDKLFIQLVQTYNQLFEENPINASGVDAKAILSARLSKSRRLENLIAQLPGEKKNGLFGNLIALSLGLTPNFKSNFDLAEDAKLQLSKDTYDDDLDNLLAQIGDQYADLFLAAKNLSDAILLSDILRVNTEITKAPLSASMIKRYDEHHQDLTLLKALVRQQLPEKYKEIFFDQSKNGYAGYIDGGASQEEFYKFIKPILEKMDGTEELLVKLNREDLLRKQRTFDNGSIPHQIHLGELHAILRRQEDFYPFLKDNREKIEKILTFRIPYYVGPLARGNSRFAWMTRKSEETITPWNFEEVVDKGASAQSFIERMTNFDKNLPNEKVLPKHSLLYEYFTVYNELTKVKYVTEGMRKPAFLSGEQKKAIVDLLFKTNRKVTVKQLKEDYFKKIECFDSVEISGVEDRFNASLGTYHDLLKIIKDKDFLDNEENEDILEDIVLTLTLFEDREMIEERLKTYAHLFDDKVMKQLKRRRYTGWGRLSRKLINGIRDKQSGKTILDFLKSDGFANRNFMQLIHDDSLTFKEDIQKAQVSGQGDSLHEHIANLAGSPAIKKGILQTVKVVDELVKVMGRHKPENIVIEMARENQTTQKGQKNSRERMKRIEEGIKELGSQILKEHPVENTQLQNEKLYLYYLQNGRDMYVDQELDINRLSDYDVDHIVPQSFLKDDSIDNKVLTRSDKNRGKSDNVPSEEVVKKMKNYWRQLLNAKLITQRKFDNLTKAERGGLSELDKAGFIKRQLVETRQITKHVAQILDSRMNTKYDENDKLIREVKVITLKSKLVSDFRKDFQFYKVREINNYHHAHDAYLNAVVGTALIKKYPKLESEFVYGDYKVYDVRKMIAKSEQEIGKATAKYFFYSGSSGSETPGTSESATPESSGSEVEFSHEYWMRHALTLAKRARDEREVPVGAVLVLNNRVIGEGWNRAIGLHDPTAHAEIMALRQGGLVMQNYRLIDATLYVTFEPCVMCAGAMIHSRIGRVVFGVRNAKTGAAGSLMDVLHYPGMNHRVEITEGILADECAALLCYFFRMPRQVFNAQKKAQSSTDNIMNFFKTEITLANGEIRKRPLIETNGETGEIVWDKGRDFATVRKVLSMPQVNIVKKTEVQTGGFSKESILPKRNSDKLIARKKDWDPKKYGGFDSPTVAYSVLVVAKVEKGKSKKLKSVKELLGITIMERSSFEKNPIDFLEAKGYKEVKKDLIIKLPKYSLFELENGRKRMLASAGELQKGNELALPSKYVNFLYLASHYEKLKGSPEDNEQKQLFVEQHKHYLDEIIEQISEFSKRVILADANLDKVLSAYNKHRDKPIREQAENIIHLFTLTNLGAPAAFKYFDTTIDRKRYTSTKEVLDATLIHQSITGLYETRIDLSQLGGD

SEQ ID NO: 267 - protein, 1554 aa, synthetic construct
  REGION 1..1554: note = 105 Cas9 TadAins 1068 polypeptide sequence
MDKKYSIGLAIGTNSVGWAVITDEYKVPSKKFKVLGNTDRHSIKKNLIGALLFDSGETAEATRLKRTARRRYTRRKNRICYLQEIFSNEMAKVDDSFFHRLEESFLVEEDKKHERHPIFGNIVDEVAYHEKYPTIYHLRKKLVDSTDKADLRLIYLALAHMIKFRGHFLIEGDLNPDNSDVDKLFIQLVQTYNQLFEENPINASGVDAKAILSARLSKSRRLENLIAQLPGEKKNGLFGNLIALSLGLTPNFKSNFDLAEDAKLQLSKDTYDDDLDNLLAQIGDQYADLFLAAKNLSDAILLSDILRVNTEITKAPLSASMIKRYDEHHQDLTLLKALVRQQLPEKYKEIFFDQSKNGYAGYIDGGASQEEFYKFIKPILEKMDGTEELLVKLNREDLLRKQRTFDNGSIPHQIHLGELHAILRRQEDFYPFLKDNREKIEKILTFRIPYYVGPLARGNSRFAWMTRKSEETITPWNFEEVVDKGASAQSFIERMTNFDKNLPNEKVLPKHSLLYEYFTVYNELTKVKYVTEGMRKPAFLSGEQKKAIVDLLFKTNRKVTVKQLKEDYFKKIECFDSVEISGVEDRFNASLGTYHDLLKIIKDKDFLDNEENEDILEDIVLTLTLFEDREMIEERLKTYAHLFDDKVMKQLKRRRYTGWGRLSRKLINGIRDKQSGKTILDFLKSDGFANRNFMQLIHDDSLTFKEDIQKAQVSGQGDSLHEHIANLAGSPAIKKGILQTVKVVDELVKVMGRHKPENIVIEMARENQTTQKGQKNSRERMKRIEEGIKELGSQILKEHPVENTQLQNEKLYLYYLQNGRDMYVDQELDINRLSDYDVDHIVPQSFLKDDSIDNKVLTRSDKNRGKSDNVPSEEVVKKMKNYWRQLLNAKLITQRKFDNLTKAERGGLSELDKAGFIKRQLVETRQITKHVAQILDSRMNTKYDENDKLIREVKVITLKSKLVSDFRKDFQFYKVREINNYHHAHDAYLNAVVGTALIKKYPKLESEFVYGDYKVYDVRKMIAKSEQEIGKATAKYFFYSNIMNFFKTEITLANGEIRKRPLIETNGEGSSGSETPGTSESATPESSGSEVEFSHEYWMRHALTLAKRARDEREVPVGAVLVLNNRVIGEGWNRAIGLHDPTAHAEIMALRQGGLVMQNYRLIDATLYVTFEPCVMCAGAMIHSRIGRVVFGVRNAKTGAAGSLMDVLHYPGMNHRVEITEGILADECAALLCYFFRMPRQVFNAQKKAQSSTDTGEIVWDKGRDFATVRKVLSMPQVNIVKKTEVQTGGFSKESILPKRNSDKLIARKKDWDPKKYGGFDSPTVAYSVLVVAKVEKGKSKKLKSVKELLGITIMERSSFEKNPIDFLEAKGYKEVKKDLIIKLPKYSLFELENGRKRMLASAGELQKGNELALPSKYVNFLYLASHYEKLKGSPEDNEQKQLFVEQHKHYLDEIIEQISEFSKRVILADANLDKVLSAYNKHRDKPIREQAENIIHLFTLTNLGAPAAFKYFDTTIDRKRYTSTKEVLDATLIHQSITGLYETRIDLSQLGGD

SEQ ID NO: 268 - protein, 1554 aa, synthetic construct
  REGION 1..1554: note = 106 Cas9 TadAins 1247 polypeptide sequence
MDKKYSIGLAIGTNSVGWAVITDEYKVPSKKFKVLGNTDRHSIKKNLIGALLFDSGETAEATRLKRTARRRYTRRKNRICYLQEIFSNEMAKVDDSFFHRLEESFLVEEDKKHERHPIFGNIVDEVAYHEKYPTIYHLRKKLVDSTDKADLRLIYLALAHMIKFRGHFLIEGDLNPDNSDVDKLFIQLVQTYNQLFEENPINASGVDAKAILSARLSKSRRLENLIAQLPGEKKNGLFGNLIALSLGLTPNFKSNFDLAEDAKLQLSKDTYDDDLDNLLAQIGDQYADLFLAAKNLSDAILLSDILRVNTEITKAPLSASMIKRYDEHHQDLTLLKALVRQQLPEKYKEIFFDQSKNGYAGYIDGGASQEEFYKFIKPILEKMDGTEELLVKLNREDLLRKQRTFDNGSIPHQIHLGELHAILRRQEDFYPFLKDNREKIEKILTFRIPYYVGPLARGNSRFAWMTRKSEETITPWNFEEVVDKGASAQSFIERMTNFDKNLPNEKVLPKHSLLYEYFTVYNELTKVKYVTEGMRKPAFLSGEQKKAIVDLLFKTNRKVTVKQLKEDYFKKIECFDSVEISGVEDRFNASLGTYHDLLKIIKDKDFLDNEENEDILEDIVLTLTLFEDREMIEERLKTYAHLFDDKVMKQLKRRRYTGWGRLSRKLINGIRDKQSGKTILDFLKSDGFANRNFMQLIHDDSLTFKEDIQKAQVSGQGDSLHEHIANLAGSPAIKKGILQTVKVVDELVKVMGRHKPENIVIEMARENQTTQKGQKNSRERMKRIEEGIKELGSQILKEHPVENTQLQNEKLYLYYLQNGRDMYVDQELDINRLSDYDVDHIVPQSFLKDDSIDNKVLTRSDKNRGKSDNVPSEEVVKKMKNYWRQLLNAKLITQRKFDNLTKAERGGLSELDKAGFIKRQLVETRQITKHVAQILDSRMNTKYDENDKLIREVKVITLKSKLVSDFRKDFQFYKVREINNYHHAHDAYLNAVVGTALIKKYPKLESEFVYGDYKVYDVRKMIAKSEQEIGKATAKYFFYSNIMNFFKTEITLANGEIRKRPLIETNGETGEIVWDKGRDFATVRKVLSMPQVNIVKKTEVQTGGFSKESILPKRNSDKLIARKKDWDPKKYGGFDSPTVAYSVLVVAKVEKGKSKKLKSVKELLGITIMERSSFEKNPIDFLEAKGYKEVKKDLIIKLPKYSLFELENGRKRMLASAGELQKGNELALPSKYVNFLYLASHYEKLKGGSSGSETPGTSESATPESSGSEVEFSHEYWMRHALTLAKRARDEREVPVGAVLVLNNRVIGEGWNRAIGLHDPTAHAEIMALRQGGLVMQNYRLIDATLYVTFEPCVMCAGAMIHSRIGRVVFGVRNAKTGAAGSLMDVLHYPGMNHRVEITEGILADECAALLCYFFRMPRQVFNAQKKAQSSTDSPEDNEQKQLFVEQHKHYLDEIIEQISEFSKRVILADANLDKVLSAYNKHRDKPIREQAENIIHLFTLTNLGAPAAFKYFDTTIDRKRYTSTKEVLDATLIHQSITGLYETRIDLSQLGGD

SEQ ID NO: 269 - protein, 1554 aa, synthetic construct
  REGION 1..1554: note = 107 Cas9 TadAins 1054 polypeptide sequence
MDKKYSIGLAIGTNSVGWAVITDEYKVPSKKFKVLGNTDRHSIKKNLIGALLFDSGETAEATRLKRTARRRYTRRKNRICYLQEIFSNEMAKVDDSFFHRLEESFLVEEDKKHERHPIFGNIVDEVAYHEKYPTIYHLRKKLVDSTDKADLRLIYLALAHMIKFRGHFLIEGDLNPDNSDVDKLFIQLVQTYNQLFEENPINASGVDAKAILSARLSKSRRLENLIAQLPGEKKNGLFGNLIALSLGLTPNFKSNFDLAEDAKLQLSKDTYDDDLDNLLAQIGDQYADLFLAAKNLSDAILLSDILRVNTEITKAPLSASMIKRYDEHHQDLTLLKALVRQQLPEKYKEIFFDQSKNGYAGYIDGGASQEEFYKFIKPILEKMDGTEELLVKLNREDLLRKQRTFDNGSIPHQIHLGELHAILRRQEDFYPFLKDNREKIEKILTFRIPYYVGPLARGNSRFAWMTRKSEETITPWNFEEVVDKGASAQSFIERMTNFDKNLPNEKVLPKHSLLYEYFTVYNELTKVKYVTEGMRKPAFLSGEQKKAIVDLLFKTNRKVTVKQLKEDYFKKIECFDSVEISGVEDRFNASLGTYHDLLKIIKDKDFLDNEENEDILEDIVLTLTLFEDREMIEERLKTYAHLFDDKVMKQLKRRRYTGWGRLSRKLINGIRDKQSGKTILDFLKSDGFANRNFMQLIHDDSLTFKEDIQKAQVSGQGDSLHEHIANLAGSPAIKKGILQTVKVVDELVKVMGRHKPENIVIEMARENQTTQKGQKNSRERMKRIEEGIKELGSQILKEHPVENTQLQNEKLYLYYLQNGRDMYVDQELDINRLSDYDVDHIVPQSFLKDDSIDNKVLTRSDKNRGKSDNVPSEEVVKKMKNYWRQLLNAKLITQRKFDNLTKAERGGLSELDKAGFIKRQLVETRQITKHVAQILDSRMNTKYDENDKLIREVKVITLKSKLVSDFRKDFQFYKVREINNYHHAHDAYLNAVVGTALIKKYPKLESEFVYGDYKVYDVRKMIAKSEQEIGKATAKYFFYSNIMNFFKTEITLANGSSGSETPGTSESATPESSGSEVEFSHEYWMRHALTLAKRARDEREVPVGAVLVLNNRVIGEGWNRAIGLHDPTAHAEIMALRQGGLVMQNYRLIDATLYVTFEPCVMCAGAMIHSRIGRVVFGVRNAKTGAAGSLMDVLHYPGMNHRVEITEGILADECAALLCYFFRMPRQVFNAQKKAQSSTDGEIRKRPLIETNGETGEIVWDKGRDFATVRKVLSMPQVNIVKKTEVQTGGFSKESILPKRNSDKLIARKKDWDPKKYGGFDSPTVAYSVLVVAKVEKGKSKKLKSVKELLGITIMERSSFEKNPIDFLEAKGYKEVKKDLIIKLPKYSLFELENGRKRMLASAGELQKGNELALPSKYVNFLYLASHYEKLKGSPEDNEQKQLFVEQHKHYLDEIIEQISEFSKRVILADANLDKVLSAYNKHRDKPIREQAENIIHLFTLTNLGAPAAFKYFDTTIDRKRYTSTKEVLDATLIHQSITGLYETRIDLSQLGGD

SEQ ID NO: 270 - protein, 1554 aa, synthetic construct
  REGION 1..1554: note = 108 Cas9 TadAins 1026 polypeptide sequence
MDKKYSIGLAIGTNSVGWAVITDEYKVPSKKFKVLGNTDRHSIKKNLIGALLFDSGETAEATRLKRTARRRYTRRKNRICYLQEIFSNEMAKVDDSFFHRLEESFLVEEDKKHERHPIFGNIVDEVAYHEKYPTIYHLRKKLVDSTDKADLRLIYLALAHMIKFRGHFLIEGDLNPDNSDVDKLFIQLVQTYNQLFEENPINASGVDAKAILSARLSKSRRLENLIAQLPGEKKNGLFGNLIALSLGLTPNFKSNFDLAEDAKLQLSKDTYDDDLDNLLAQIGDQYADLFLAAKNLSDAILLSDILRVNTEITKAPLSASMIKRYDEHHQDLTLLKALVRQQLPEKYKEIFFDQSKNGYAGYIDGGASQEEFYKFIKPILEKMDGTEELLVKLNREDLLRKQRTFDNGSIPHQIHLGELHAILRRQEDFYPFLKDNREKIEKILTFRIPYYVGPLARGNSRFAWMTRKSEETITPWNFEEVVDKGASAQSFIERMTNFDKNLPNEKVLPKHSLLYEYFTVYNELTKVKYVTEGMRKPAFLSGEQKKAIVDLLFKTNRKVTVKQLKEDYFKKIECFDSVEISGVEDRFNASLGTYHDLLKIIKDKDFLDNEENEDILEDIVLTLTLFEDREMIEERLKTYAHLFDDKVMKQLKRRRYTGWGRLSRKLINGIRDKQSGKTILDFLKSDGFANRNFMQLIHDDSLTFKEDIQKAQVSGQGDSLHEHIANLAGSPAIKKGILQTVKVVDELVKVMGRHKPENIVIEMARENQTTQKGQKNSRERMKRIEEGIKELGSQILKEHPVENTQLQNEKLYLYYLQNGRDMYVDQELDINRLSDYDVDHIVPQSFLKDDSIDNKVLTRSDKNRGKSDNVPSEEVVKKMKNYWRQLLNAKLITQRKFDNLTKAERGGLSELDKAGFIKRQLVETRQITKHVAQILDSRMNTKYDENDKLIREVKVITLKSKLVSDFRKDFQFYKVREINNYHHAHDAYLNAVVGTALIKKYPKLESEFVYGDYKVYDVRKMIAKSEGSSGSETPGTSESATPESSGSEVEFSHEYWMRHALTLAKRARDEREVPVGAVLVLNNRVIGEGWNRAIGLHDPTAHAEIMALRQGGLVMQNYRLIDATLYVTFEPCVMCAGAMIHSRIGRVVFGVRNAKTGAAGSLMDVLHYPGMNHRVEITEGILADECAALLCYFFRMPRQVFNAQKKAQSSTDQEIGKATAKYFFYSNIMNFFKTEITLANGEIRKRPLIETNGETGEIVWDKGRDFATVRKVLSMPQVNIVKKTEVQTGGFSKESILPKRNSDKLIARKKDWDPKKYGGFDSPTVAYSVLVVAKVEKGKSKKLKSVKELLGITIMERSSFEKNPIDFLEAKGYKEVKKDLIIKLPKYSLFELENGRKRMLASAGELQKGNELALPSKYVNFLYLASHYEKLKGSPEDNEQKQLFVEQHKHYLDEIIEQISEFSKRVILADANLDKVLSAYNKHRDKPIREQAENIIHLFTLTNLGAPAAFKYFDTTIDRKRYTSTKEVLDATLIHQSITGLYETRIDLSQLGGD

SEQ ID NO: 271 - protein, 1540 aa, synthetic construct
  REGION 1..1540: note = 109 Cas9 TadAins 768 polypeptide sequence
MDKKYSIGLAIGTNSVGWAVITDEYKVPSKKFKVLGNTDRHSIKKNLIGALLFDSGETAEATRLKRTARRRYTRRKNRICYLQEIFSNEMAKVDDSFFHRLEESFLVEEDKKHERHPIFGNIVDEVAYHEKYPTIYHLRKKLVDSTDKADLRLIYLALAHMIKFRGHFLIEGDLNPDNSDVDKLFIQLVQTYNQLFEENPINASGVDAKAILSARLSKSRRLENLIAQLPGEKKNGLFGNLIALSLGLTPNFKSNFDLAEDAKLQLSKDTYDDDLDNLLAQIGDQYADLFLAAKNLSDAILLSDILRVNTEITKAPLSASMIKRYDEHHQDLTLLKALVRQQLPEKYKEIFFDQSKNGYAGYIDGGASQEEFYKFIKPILEKMDGTEELLVKLNREDLLRKQRTFDNGSIPHQIHLGELHAILRRQEDFYPFLKDNREKIEKILTFRIPYYVGPLARGNSRFAWMTRKSEETITPWNFEEVVDKGASAQSFIERMTNFDKNLPNEKVLPKHSLLYEYFTVYNELTKVKYVTEGMRKPAFLSGEQKKAIVDLLFKTNRKVTVKQLKEDYFKKIECFDSVEISGVEDRFNASLGTYHDLLKIIKDKDFLDNEENEDILEDIVLTLTLFEDREMIEERLKTYAHLFDDKVMKQLKRRRYTGWGRLSRKLINGIRDKQSGKTILDFLKSDGFANRNFMQLIHDDSLTFKEDIQKAQVSGQGDSLHEHIANLAGSPAIKKGILQTVKVVDELVKVMGRHKPENIVIEMARENQGSSGSETPGTSESATPESSGSEVEFSHEYWMRHALTLAKRARDEREVPVGAVLVLNNRVIGEGWNRAIGLHDPTAHAEIMALRQGGLVMQNYRLIDATLYVTFEPCVMCAGAMIHSRIGRVVFGVRNAKTGAAGSLMDVLHYPGMNHRVEITEGILADECAALLCYFFRMPRTTQKGQKNSRERMKRIEEGIKELGSQILKEHPVENTQLQNEKLYLYYLQNGRDMYVDQELDINRLSDYDVDHIVPQSFLKDDSIDNKVLTRSDKNRGKSDNVPSEEVVKKMKNYWRQLLNAKLITQRKFDNLTKAERGGLSELDKAGFIKRQLVETRQITKHVAQILDSRMNTKYDENDKLIREVKVITLKSKLVSDFRKDFQFYKVREINNYHHAHDAYLNAVVGTALIKKYPKLESEFVYGDYKVYDVRKMIAKSEQEIGKATAKYFFYSNIMNFFKTEITLANGEIRKRPLIETNGETGEIVWDKGRDFATVRKVLSMPQVNIVKKTEVQTGGFSKESILPKRNSDKLIARKKDWDPKKYGGFDSPTVAYSVLVVAKVEKGKSKKLKSVKELLGITIMERSSFEKNPIDFLEAKGYKEVKKDLIIKLPKYSLFELENGRKRMLASAGELQKGNELALPSKYVNFLYLASHYEKLKGSPEDNEQKQLFVEQHKHYLDEIIEQISEFSKRVILADANLDKVLSAYNKHRDKPIREQAENIIHLFTLTNLGAPAAFKYFDTTIDRKRYTSTKEVLDATLIHQSITGLYETRIDLSQLGGD

SEQ ID NO: 272 - protein, 1540 aa, synthetic construct
  REGION 1..1540: note = 110.1 Cas9 TadAins 1250 polypeptide sequence
MDKKYSIGLAIGTNSVGWAVITDEYKVPSKKFKVLGNTDRHSIKKNLIGALLFDSGETAEATRLKRTARRRYTRRKNRICYLQEIFSNEMAKVDDSFFHRLEESFLVEEDKKHERHPIFGNIVDEVAYHEKYPTIYHLRKKLVDSTDKADLRLIYLALAHMIKFRGHFLIEGDLNPDNSDVDKLFIQLVQTYNQLFEENPINASGVDAKAILSARLSKSRRLENLIAQLPGEKKNGLFGNLIALSLGLTPNFKSNFDLAEDAKLQLSKDTYDDDLDNLLAQIGDQYADLFLAAKNLSDAILLSDILRVNTEITKAPLSASMIKRYDEHHQDLTLLKALVRQQLPEKYKEIFFDQSKNGYAGYIDGGASQEEFYKFIKPILEKMDGTEELLVKLNREDLLRKQRTFDNGSIPHQIHLGELHAILRRQEDFYPFLKDNREKIEKILTFRIPYYVGPLARGNSRFAWMTRKSEETITPWNFEEVVDKGASAQSFIERMTNFDKNLPNEKVLPKHSLLYEYFTVYNELTKVKYVTEGMRKPAFLSGEQKKAIVDLLFKTNRKVTVKQLKEDYFKKIECFDSVEISGVEDRFNASLGTYHDLLKIIKDKDFLDNEENEDILEDIVLTLTLFEDREMIEERLKTYAHLFDDKVMKQLKRRRYTGWGRLSRKLINGIRDKQSGKTILDFLKSDGFANRNFMQLIHDDSLTFKEDIQKAQVSGQGDSLHEHIANLAGSPAIKKGILQTVKVVDELVKVMGRHKPENIVIEMARENQTTQKGQKNSRERMKRIEEGIKELGSQILKEHPVENTQLQNEKLYLYYLQNGRDMYVDQELDINRLSDYDVDHIVPQSFLKDDSIDNKVLTRSDKNRGKSDNVPSEEVVKKMKNYWRQLLNAKLITQRKFDNLTKAERGGLSELDKAGFIKRQLVETRQITKHVAQILDSRMNTKYDENDKLIREVKVITLKSKLVSDFRKDFQFYKVREINNYHHAHDAYLNAVVGTALIKKYPKLESEFVYGDYKVYDVRKMIAKSEQEIGKATAKYFFYSNIMNFFKTEITLANGEIRKRPLIETNGETGEIVWDKGRDFATVRKVLSMPQVNIVKKTEVQTGGFSKESILPKRNSDKLIARKKDWDPKKYGGFDSPTVAYSVLVVAKVEKGKSKKLKSVKELLGITIMERSSFEKNPIDFLEAKGYKEVKKDLIIKLPKYSLFELENGRKRMLASAGELQKGNELALPSKYVNFLYLASHYEKLKGSPGSSGSETPGTSESATPESSGSEVEFSHEYWMRHALTLAKRARDEREVPVGAVLVLNNRVIGEGWNRAIGLHDPTAHAEIMALRQGGLVMQNYRLIDATLYVTFEPCVMCAGAMIHSRIGRVVFGVRNAKTGAAGSLMDVLHYPGMNHRVEITEGILADECAALLCYFFRMPREDNEQKQLFVEQHKHYLDEIIEQISEFSKRVILADANLDKVLSAYNKHRDKPIREQAENIIHLFTLTNLGAPAAFKYFDTTIDRKRYTSTKEVLDATLIHQSITGLYETRIDLSQLGGD

SEQ ID NO: 273 - protein, 1543 aa, synthetic construct
  REGION 1..1543: note = 110.2 Cas9 TadAins 1250 polypeptide sequence
MDKKYSIGLAIGTNSVGWAVITDEYKVPSKKFKVLGNTDRHSIKKNLIGALLFDSGETAEATRLKRTARRRYTRRKNRICYLQEIFSNEMAKVDDSFFHRLEESFLVEEDKKHERHPIFGNIVDEVAYHEKYPTIYHLRKKLVDSTDKADLRLIYLALAHMIKFRGHFLIEGDLNPDNSDVDKLFIQLVQTYNQLFEENPINASGVDAKAILSARLSKSRRLENLIAQLPGEKKNGLFGNLIALSLGLTPNFKSNFDLAEDAKLQLSKDTYDDDLDNLLAQIGDQYADLFLAAKNLSDAILLSDILRVNTEITKAPLSASMIKRYDEHHQDLTLLKALVRQQLPEKYKEIFFDQSKNGYAGYIDGGASQEEFYKFIKPILEKMDGTEELLVKLNREDLLRKQRTFDNGSIPHQIHLGELHAILRRQEDFYPFLKDNREKIEKILTFRIPYYVGPLARGNSRFAWMTRKSEETITPWNFEEVVDKGASAQSFIERMTNFDKNLPNEKVLPKHSLLYEYFTVYNELTKVKYVTEGMRKPAFLSGEQKKAIVDLLFKTNRKVTVKQLKEDYFKKIECFDSVEISGVEDRFNASLGTYHDLLKIIKDKDFLDNEENEDILEDIVLTLTLFEDREMIEERLKTYAHLFDDKVMKQLKRRRYTGWGRLSRKLINGIRDKQSGKTILDFLKSDGFANRNFMQLIHDDSLTFKEDIQKAQVSGQGDSLHEHIANLAGSPAIKKGILQTVKVVDELVKVMGRHKPENIVIEMARENQTTQKGQKNSRERMKRIEEGIKELGSQILKEHPVENTQLQNEKLYLYYLQNGRDMYVDQELDINRLSDYDVDHIVPQSFLKDDSIDNKVLTRSDKNRGKSDNVPSEEVVKKMKNYWRQLLNAKLITQRKFDNLTKAERGGLSELDKAGFIKRQLVETRQITKHVAQILDSRMNTKYDENDKLIREVKVITLKSKLVSDFRKDFQFYKVREINNYHHAHDAYLNAVVGTALIKKYPKLESEFVYGDYKVYDVRKMIAKSEQEIGKATAKYFFYSNIMNFFKTEITLANGEIRKRPLIETNGETGEIVWDKGRDFATVRKVLSMPQVNIVKKTEVQTGGFSKESILPKRNSDKLIARKKDWDPKKYGGFDSPTVAYSVLVVAKVEKGKSKKLKSVKELLGITIMERSSFEKNPIDFLEAKGYKEVKKDLIIKLPKYSLFELENGRKRMLASAGELQKGNELALPSKYVNFLYLASHYEKLKGSPGSSGSSGSETPGTSESATPESSGSEVEFSHEYWMRHALTLAKRARDEREVPVGAVLVLNNRVIGEGWNRAIGLHDPTAHAEIMALRQGGLVMQNYRLIDATLYVTFEPCVMCAGAMIHSRIGRVVFGVRNAKTGAAGSLMDVLHYPGMNHRVEITEGILADECAALLCYFFRMPREDNEQKQLFVEQHKHYLDEIIEQISEFSKRVILADANLDKVLSAYNKHRDKPIREQAENIIHLFTLTNLGAPAAFKYFDTTIDRKRYTSTKEVLDATLIHQSITGLYETRIDLSQLGGD

SEQ ID NO: 274 - protein, 1546 aa, synthetic construct
  REGION 1..1546: note = 110.3 Cas9 TadAins 1250 polypeptide sequence
MDKKYSIGLAIGTNSVGWAVITDEYKVPSKKFKVLGNTDRHSIKKNLIGALLFDSGETAEATRLKRTARRRYTRRKNRICYLQEIFSNEMAKVDDSFFHRLEESFLVEEDKKHERHPIFGNIVDEVAYHEKYPTIYHLRKKLVDSTDKADLRLIYLALAHMIKFRGHFLIEGDLNPDNSDVDKLFIQLVQTYNQLFEENPINASGVDAKAILSARLSKSRRLENLIAQLPGEKKNGLFGNLIALSLGLTPNFKSNFDLAEDAKLQLSKDTYDDDLDNLLAQIGDQYADLFLAAKNLSDAILLSDILRVNTEITKAPLSASMIKRYDEHHQDLTLLKALVRQQLPEKYKEIFFDQSKNGYAGYIDGGASQEEFYKFIKPILEKMDGTEELLVKLNREDLLRKQRTFDNGSIPHQIHLGELHAILRRQEDFYPFLKDNREKIEKILTFRIPYYVGPLARGNSRFAWMTRKSEETITPWNFEEVVDKGASAQSFIERMTNFDKNLPNEKVLPKHSLLYEYFTVYNELTKVKYVTEGMRKPAFLSGEQKKAIVDLLFKTNRKVTVKQLKEDYFKKIECFDSVEISGVEDRFNASLGTYHDLLKIIKDKDFLDNEENEDILEDIVLTLTLFEDREMIEERLKTYAHLFDDKVMKQLKRRRYTGWGRLSRKLINGIRDKQSGKTILDFLKSDGFANRNFMQLIHDDSLTFKEDIQKAQVSGQGDSLHEHIANLAGSPAIKKGILQTVKVVDELVKVMGRHKPENIVIEMARENQTTQKGQKNSRERMKRIEEGIKELGSQILKEHPVENTQLQNEKLYLYYLQNGRDMYVDQELDINRLSDYDVDHIVPQSFLKDDSIDNKVLTRSDKNRGKSDNVPSEEVVKKMKNYWRQLLNAKLITQRKFDNLTKAERGGLSELDKAGFIKRQLVETRQITKHVAQILDSRMNTKYDENDKLIREVKVITLKSKLVSDFRKDFQFYKVREINNYHHAHDAYLNAVVGTALIKKYPKLESEFVYGDYKVYDVRKMIAKSEQEIGKATAKYFFYSNIMNFFKTEITLANGEIRKRPLIETNGETGEIVWDKGRDFATVRKVLSMPQVNIVKKTEVQTGGFSKESILPKRNSDKLIARKKDWDPKKYGGFDSPTVAYSVLVVAKVEKGKSKKLKSVKELLGITIMERSSFEKNPIDFLEAKGYKEVKKDLIIKLPKYSLFELENGRKRMLASAGELQKGNELALPSKYVNFLYLASHYEKLKGSPGSSGSSGSETPGTSESATPESGSSSGSEVEFSHEYWMRHALTLAKRARDEREVPVGAVLVLNNRVIGEGWNRAIGLHDPTAHAEIMALRQGGLVMQNYRLIDATLYVTFEPCVMCAGAMIHSRIGRVVFGVRNAKTGAAGSLMDVLHYPGMNHRVEITEGILADECAALLCYFFRMPREDNEQKQLFVEQHKHYLDEIIEQISEFSKRVILADANLDKVLSAYNKHRDKPIREQAENIIHLFTLTNLGAPAAFKYFDTTIDRKRYTSTKEVLDATLIHQSITGLYETRIDLSQLGGD

SEQ ID NO: 275 - protein, 1546 aa, synthetic construct
  REGION 1..1546: note = 110.4 Cas9 TadAins 1250 polypeptide sequence
MDKKYSIGLAIGTNSVGWAVITDEYKVPSKKFKVLGNTDRHSIKKNLIGALLFDSGETAEATRLKRTARRRYTRRKNRICYLQEIFSNEMAKVDDSFFHRLEESFLVEEDKKHERHPIFGNIVDEVAYHEKYPTIYHLRKKLVDSTDKADLRLIYLALAHMIKFRGHFLIEGDLNPDNSDVDKLFIQLVQTYNQLFEENPINASGVDAKAILSARLSKSRRLENLIAQLPGEKKNGLFGNLIALSLGLTPNFKSNFDLAEDAKLQLSKDTYDDDLDNLLAQIGDQYADLFLAAKNLSDAILLSDILRVNTEITKAPLSASMIKRYDEHHQDLTLLKALVRQQLPEKYKEIFFDQSKNGYAGYIDGGASQEEFYKFIKPILEKMDGTEELLVKLNREDLLRKQRTFDNGSIPHQIHLGELHAILRRQEDFYPFLKDNREKIEKILTFRIPYYVGPLARGNSRFAWMTRKSEETITPWNFEEVVDKGASAQSFIERMTNFDKNLPNEKVLPKHSLLYEYFTVYNELTKVKYVTEGMRKPAFLSGEQKKAIVDLLFKTNRKVTVKQLKEDYFKKIECFDSVEISGVEDRFNASLGTYHDLLKIIKDKDFLDNEENEDILEDIVLTLTLFEDREMIEERLKTYAHLFDDKVMKQLKRRRYTGWGRLSRKLINGIRDKQSGKTILDFLKSDGFANRNFMQLIHDDSLTFKEDIQKAQVSGQGDSLHEHIANLAGSPAIKKGILQTVKVVDELVKVMGRHKPENIVIEMARENQTTQKGQKNSRERMKRIEEGIKELGSQILKEHPVENTQLQNEKLYLYYLQNGRDMYVDQELDINRLSDYDVDHIVPQSFLKDDSIDNKVLTRSDKNRGKSDNVPSEEVVKKMKNYWRQLLNAKLITQRKFDNLTKAERGGLSELDKAGFIKRQLVETRQITKHVAQILDSRMNTKYDENDKLIREVKVITLKSKLVSDFRKDFQFYKVREINNYHHAHDAYLNAVVGTALIKKYPKLESEFVYGDYKVYDVRKMIAKSEQEIGKATAKYFFYSNIMNFFKTEITLANGEIRKRPLIETNGETGEIVWDKGRDFATVRKVLSMPQVNIVKKTEVQTGGFSKESILPKRNSDKLIARKKDWDPKKYGGFDSPTVAYSVLVVAKVEKGKSKKLKSVKELLGITIMERSSFEKNPIDFLEAKGYKEVKKDLIIKLPKYSLFELENGRKRMLASAGELQKGNELALPSKYVNFLYLASHYEKLKGSPGSSGSSGSETPGTSESATPESGSSSGSEVEFSHEYWMRHALTLAKRARDEREVPVGAVLVLNNRVIGEGWNRAIGLHDPTAHAEIMALRQGGLVMQNYRLIDATLYVTFEPCVMCAGAMIHSRIGRVVFGVRNAKTGAAGSLMDVLHYPGMNHRVEITEGILADECAALLCYFFRMRREDNEQKQLFVEQHKHYLDEIIEQISEFSKRVILADANLDKVLSAYNKHRDKPIREQAENIIHLFTLTNLGAPAAFKYFDTTIDRKRYTSTKEVLDATLIHQSITGLYETRIDLSQLGGD

SEQ ID NO: 276 - protein, 1546 aa, synthetic construct
  REGION 1..1546: note = 110.5 Cas9 TadAins 1249 polypeptide sequence
MDKKYSIGLAIGTNSVGWAVITDEYKVPSKKFKVLGNTDRHSIKKNLIGALLFDSGETAEATRLKRTARRRYTRRKNRICYLQEIFSNEMAKVDDSFFHRLEESFLVEEDKKHERHPIFGNIVDEVAYHEKYPTIYHLRKKLVDSTDKADLRLIYLALAHMIKFRGHFLIEGDLNPDNSDVDKLFIQLVQTYNQLFEENPINASGVDAKAILSARLSKSRRLENLIAQLPGEKKNGLFGNLIALSLGLTPNFKSNFDLAEDAKLQLSKDTYDDDLDNLLAQIGDQYADLFLAAKNLSDAILLSDILRVNTEITKAPLSASMIKRYDEHHQDLTLLKALVRQQLPEKYKEIFFDQSKNGYAGYIDGGASQEEFYKFIKPILEKMDGTEELLVKLNREDLLRKQRTFDNGSIPHQIHLGELHAILRRQEDFYPFLKDNREKIEKILTFRIPYYVGPLARGNSRFAWMTRKSEETITPWNFEEVVDKGASAQSFIERMTNFDKNLPNEKVLPKHSLLYEYFTVYNELTKVKYVTEGMRKPAFLSGEQKKAIVDLLFKTNRKVTVKQLKEDYFKKIECFDSVEISGVEDRFNASLGTYHDLLKIIKDKDFLDNEENEDILEDIVLTLTLFEDREMIEERLKTYAHLFDDKVMKQLKRRRYTGWGRLSRKLINGIRDKQSGKTILDFLKSDGFANRNFMQLIHDDSLTFKEDIQKAQVSGQGDSLHEHIANLAGSPAIKKGILQTVKVVDELVKVMGRHKPENIVIEMARENQTTQKGQKNSRERMKRIEEGIKELGSQILKEHPVENTQLQNEKLYLYYLQNGRDMYVDQELDINRLSDYDVDHIVPQSFLKDDSIDNKVLTRSDKNRGKSDNVPSEEVVKKMKNYWRQLLNAKLITQRKFDNLTKAERGGLSELDKAGFIKRQLVETRQITKHVAQILDSRMNTKYDENDKLIREVKVITLKSKLVSDFRKDFQFYKVREINNYHHAHDAYLNAVVGTALIKKYPKLESEFVYGDYKVYDVRKMIAKSEQEIGKATAKYFFYSNIMNFFKTEITLANGEIRKRPLIETNGETGEIVWDKGRDFATVRKVLSMPQVNIVKKTEVQTGGFSKESILPKRNSDKLIARKKDWDPKKYGGFDSPTVAYSVLVVAKVEKGKSKKLKSVKELLGITIMERSSFEKNPIDFLEAKGYKEVKKDLIIKLPKYSLFELENGRKRMLASAGELQKGNELALPSKYVNFLYLASHYEKLKGSGSSGSSGSETPGTSESATPESGSSSGSEVEFSHEYWMRHALTLAKRARDEREVPVGAVLVLNNRVIGEGWNRAIGLHDPTAHAEIMALRQGGLVMQNYRLIDATLYVTFEPCVMCAGAMIHSRIGRVVFGVRNAKTGAAGSLMDVLHYPGMNHRVEITEGILADECAALLCYFFRMRRPEDNEQKQLFVEQHKHYLDEIIEQISEFSKRVILADANLDKVLSAYNKHRDKPIREQAENIIHLFTLTNLGAPAAFKYFDTTIDRKRYTSTKEVLDATLIHQSITGLYETRIDLSQLGGD

SEQ ID NO: 277 - protein, 1551 aa, synthetic construct
  REGION 1..1551: note = 110.5 Cas9 TadAins delta59-66 1250 polypeptide sequence
MDKKYSIGLAIGTNSVGWAVITDEYKVPSKKFKVLGNTDRHSIKKNLIGALLFDSGETAEATRLKRTARRRYTRRKNRICYLQEIFSNEMAKVDDSFFHRLEESFLVEEDKKHERHPIFGNIVDEVAYHEKYPTIYHLRKKLVDSTDKADLRLIYLALAHMIKFRGHFLIEGDLNPDNSDVDKLFIQLVQTYNQLFEENPINASGVDAKAILSARLSKSRRLENLIAQLPGEKKNGLFGNLIALSLGLTPNFKSNFDLAEDAKLQLSKDTYDDDLDNLLAQIGDQYADLFLAAKNLSDAILLSDILRVNTEITKAPLSASMIKRYDEHHQDLTLLKALVRQQLPEKYKEIFFDQSKNGYAGYIDGGASQEEFYKFIKPILEKMDGTEELLVKLNREDLLRKQRTFDNGSIPHQIHLGELHAILRRQEDFYPFLKDNREKIEKILTFRIPYYVGPLARGNSRFAWMTRKSEETITPWNFEEVVDKGASAQSFIERMTNFDKNLPNEKVLPKHSLLYEYFTVYNELTKVKYVTEGMRKPAFLSGEQKKAIVDLLFKTNRKVTVKQLKEDYFKKIECFDSVEISGVEDRFNASLGTYHDLLKIIKDKDFLDNEENEDILEDIVLTLTLFEDREMIEERLKTYAHLFDDKVMKQLKRRRYTGWGRLSRKLINGIRDKQSGKTILDFLKSDGFANRNFMQLIHDDSLTFKEDIQKAQVSGQGDSLHEHIANLAGSPAIKKGILQTVKVVDELVKVMGRHKPENIVIEMARENQTTQKGQKNSRERMKRIEEGIKELGSQILKEHPVENTQLQNEKLYLYYLQNGRDMYVDQELDINRLSDYDVDHIVPQSFLKDDSIDNKVLTRSDKNRGKSDNVPSEEVVKKMKNYWRQLLNAKLITQRKFDNLTKAERGGLSELDKAGFIKRQLVETRQITKHVAQILDSRMNTKYDENDKLIREVKVITLKSKLVSDFRKDFQFYKVREINNYHHAHDAYLNAVVGTALIKKYPKLESEFVYGDYKVYDVRKMIAKSEQEIGKATAKYFFYSNIMNFFKTEITLANGEIRKRPLIETNGETGEIVWDKGRDFATVRKVLSMPQVNIVKKTEVQTGGFSKESILPKRNSDKLIARKKDWDPKKYGGFDSPTVAYSVLVVAKVEKGKSKKLKSVKELLGITIMERSSFEKNPIDFLEAKGYKEVKKDLIIKLPKYSLFELENGRKRMLASAGELQKGNELALPSKYVNFLYLASHYEKLKGSPGSSGSSGSETPGTSESATPESGSSGSEVEFSHEYWMRHALTLAKRARDEREVPVGAVLVLNNRVIGEGWNRAHAEIMALRQGGLVMQNYRLIDATLYVTFEPCVMCAGAMIHSRIGRVVFGVRNAKTGAAGSLMDVLHYPGMNHRVEITEGILADECAALLCYFFRMPRQVFNAQKKAQSSTDEDNEQKQLFVEQHKHYLDEIIEQISEFSKRVILADANLDKVLSAYNKHRDKPIREQAENIIHLFTLTNLGAPAAFKYFDTTIDRKRYTSTKEVLDATLIHQSITGLYETRIDLSQLGGD

SEQ ID NO: 278 - protein, 1546 aa, synthetic construct
  REGION 1..1546: note = 110.6 Cas9 TadAins 1251 polypeptide sequence
MDKKYSIGLAIGTNSVGWAVITDEYKVPSKKFKVLGNTDRHSIKKNLIGALLFDSGETAEATRLKRTARRRYTRRKNRICYLQEIFSNEMAKVDDSFFHRLEESFLVEEDKKHERHPIFGNIVDEVAYHEKYPTIYHLRKKLVDSTDKADLRLIYLALAHMIKFRGHFLIEGDLNPDNSDVDKLFIQLVQTYNQLFEENPINASGVDAKAILSARLSKSRRLENLIAQLPGEKKNGLFGNLIALSLGLTPNFKSNFDLAEDAKLQLSKDTYDDDLDNLLAQIGDQYADLFLAAKNLSDAILLSDILRVNTEITKAPLSASMIKRYDEHHQDLTLLKALVRQQLPEKYKEIFFDQSKNGYAGYIDGGASQEEFYKFIKPILEKMDGTEELLVKLNREDLLRKQRTFDNGSIPHQIHLGELHAILRRQEDFYPFLKDNREKIEKILTFRIPYYVGPLARGNSRFAWMTRKSEETITPWNFEEVVDKGASAQSFIERMTNFDKNLPNEKVLPKHSLLYEYFTVYNELTKVKYVTEGMRKPAFLSGEQKKAIVDLLFKTNRKVTVKQLKEDYFKKIECFDSVEISGVEDRFNASLGTYHDLLKIIKDKDFLDNEENEDILEDIVLTLTLFEDREMIEERLKTYAHLFDDKVMKQLKRRRYTGWGRLSRKLINGIRDKQSGKTILDFLKSDGFANRNFMQLIHDDSLTFKEDIQKAQVSGQGDSLHEHIANLAGSPAIKKGILQTVKVVDELVKVMGRHKPENIVIEMARENQTTQKGQKNSRERMKRIEEGIKELGSQILKEHPVENTQLQNEKLYLYYLQNGRDMYVDQELDINRLSDYDVDHIVPQSFLKDDSIDNKVLTRSDKNRGKSDNVPSEEVVKKMKNYWRQLLNAKLITQRKFDNLTKAERGGLSELDKAGFIKRQLVETRQITKHVAQILDSRMNTKYDENDKLIREVKVITLKSKLVSDFRKDFQFYKVREINNYHHAHDAYLNAVVGTALIKKYPKLESEFVYGDYKVYDVRKMIAKSEQEIGKATAKYFFYSNIMNFFKTEITLANGEIRKRPLIETNGETGEIVWDKGRDFATVRKVLSMPQVNIVKKTEVQTGGFSKESILPKRNSDKLIARKKDWDPKKYGGFDSPTVAYSVLVVAKVEKGKSKKLKSVKELLGITIMERSSFEKNPIDFLEAKGYKEVKKDLIIKLPKYSLFELENGRKRMLASAGELQKGNELALPSKYVNFLYLASHYEKLKGSPEGSSGSSGSETPGTSESATPESGSSSGSEVEFSHEYWMRHALTLAKRARDEREVPVGAVLVLNNRVIGEGWNRAIGLHDPTAHAEIMALRQGGLVMQNYRLIDATLYVTFEPCVMCAGAMIHSRIGRVVFGVRNAKTGAAGSLMDVLHYPGMNHRVEITEGILADECAALLCYFFRMRRDNEQKQLFVEQHKHYLDEIIEQISEFSKRVILADANLDKVLSAYNKHRDKPIREQAENIIHLFTLTNLGAPAAFKYFDTTIDRKRYTSTKEVLDATLIHQSITGLYETRIDLSQLGGD

SEQ ID NO: 279 - protein, 1546 aa, synthetic construct
  REGION 1..1546: note = 110.7 Cas9 TadAins 1252 polypeptide sequence
MDKKYSIGLAIGTNSVGWAVITDEYKVPSKKFKVLGNTDRHSIKKNLIGALLFDSGETAEATRLKRTARRRYTRRKNRICYLQEIFSNEMAKVDDSFFHRLEESFLVEEDKKHERHPIFGNIVDEVAYHEKYPTIYHLRKKLVDSTDKADLRLIYLALAHMIKFRGHFLIEGDLNPDNSDVDKLFIQLVQTYNQLFEENPINASGVDAKAILSARLSKSRRLENLIAQLPGEKKNGLFGNLIALSLGLTPNFKSNFDLAEDAKLQLSKDTYDDDLDNLLAQIGDQYADLFLAAKNLSDAILLSDILRVNTEITKAPLSASMIKRYDEHHQDLTLLKALVRQQLPEKYKEIFFDQSKNGYAGYIDGGASQEEFYKFIKPILEKMDGTEELLVKLNREDLLRKQRTFDNGSIPHQIHLGELHAILRRQEDFYPFLKDNREKIEKILTFRIPYYVGPLARGNSRFAWMTRKSEETITPWNFEEVVDKGASAQSFIERMTNFDKNLPNEKVLPKHSLLYEYFTVYNELTKVKYVTEGMRKPAFLSGEQKKAIVDLLFKTNRKVTVKQLKEDYFKKIECFDSVEISGVEDRFNASLGTYHDLLKIIKDKDFLDNEENEDILEDIVLTLTLFEDREMIEERLKTYAHLFDDKVMKQLKRRRYTGWGRLSRKLINGIRDKQSGKTILDFLKSDGFANRNFMQLIHDDSLTFKEDIQKAQVSGQGDSLHEHIANLAGSPAIKKGILQTVKVVDELVKVMGRHKPENIVIEMARENQTTQKGQKNSRERMKRIEEGIKELGSQILKEHPVENTQLQNEKLYLYYLQNGRDMYVDQELDINRLSDYDVDHIVPQSFLKDDSIDNKVLTRSDKNRGKSDNVPSEEVVKKMKNYWRQLLNAKLITQRKFDNLTKAERGGLSELDKAGFIKRQLVETRQITKHVAQILDSRMNTKYDENDKLIREVKVITLKSKLVSDFRKDFQFYKVREINNYHHAHDAYLNAVVGTALIKKYPKLESEFVYGDYKVYDVRKMIAKSEQEIGKATAKYFFYSNIMNFFKTEITLANGEIRKRPLIETNGETGEIVWDKGRDFATVRKVLSMPQVNIVKKTEVQTGGFSKESILPKRNSDKLIARKKDWDPKKYGGFDSPTVAYSVLVVAKVEKGKSKKLKSVKELLGITIMERSSFEKNPIDFLEAKGYKEVKKDLIIKLPKYSLFELENGRKRMLASAGELQKGNELALPSKYVNFLYLASHYEKLKGSPEDGSSGSSGSETPGTSESATPESGSSSGSEVEFSHEYWMRHALTLAKRARDEREVPVGAVLVLNNRVIGEGWNRAIGLHDPTAHAEIMALRQGGLVMQNYRLIDATLYVTFEPCVMCAGAMIHSRIGRVVFGVRNAKTGAAGSLMDVLHYPGMNHRVEITEGILADECAALLCYFFRMRRNEQKQLFVEQHKHYLDEIIEQISEFSKRVILADANLDKVLSAYNKHRDKPIREQAENIIHLFTLTNLGAPAAFKYFDTTIDRKRYTSTKEVLDATLIHQSITGLYETRIDLSQLGGD

SEQ ID NO: 280 - protein, 1533 aa, synthetic construct
  REGION 1..1533: note = 110.8 Cas9 TadAins delta59-66 C-truncate 1250 polypeptide sequence
MDKKYSIGLAIGTNSVGWAVITDEYKVPSKKFKVLGNTDRHSIKKNLIGALLFDSGETAEATRLKRTARRRYTRRKNRICYLQEIFSNEMAKVDDSFFHRLEESFLVEEDKKHERHPIFGNIVDEVAYHEKYPTIYHLRKKLVDSTDKADLRLIYLALAHMIKFRGHFLIEGDLNPDNSDVDKLFIQLVQTYNQLFEENPINASGVDAKAILSARLSKSRRLENLIAQLPGEKKNGLFGNLIALSLGLTPNFKSNFDLAEDAKLQLSKDTYDDDLDNLLAQIGDQYADLFLAAKNLSDAILLSDILRVNTEITKAPLSASMIKRYDEHHQDLTLLKALVRQQLPEKYKEIFFDQSKNGYAGYIDGGASQEEFYKFIKPILEKMDGTEELLVKLNREDLLRKQRTFDNGSIPHQIHLGELHAILRRQEDFYPFLKDNREKIEKILTFRIPYYVGPLARGNSRFAWMTRKSEETITPWNFEEVVDKGASAQSFIERMTNFDKNLPNEKVLPKHSLLYEYFTVYNELTKVKYVTEGMRKPAFLSGEQKKAIVDLLFKTNRKVTVKQLKEDYFKKIECFDSVEISGVEDRFNASLGTYHDLLKIIKDKDFLDNEENEDILEDIVLTLTLFEDREMIEERLKTYAHLFDDKVMKQLKRRRYTGWGRLSRKLINGIRDKQSGKTILDFLKSDGFANRNFMQLIHDDSLTFKEDIQKAQVSGQGDSLHEHIANLAGSPAIKKGILQTVKVVDELVKVMGRHKPENIVIEMARENQTTQKGQKNSRERMKRIEEGIKELGSQILKEHPVENTQLQNEKLYLYYLQNGRDMYVDQELDINRLSDYDVDHIVPQSFLKDDSIDNKVLTRSDKNRGKSDNVPSEEVVKKMKNYWRQLLNAKLITQRKFDNLTKAERGGLSELDKAGFIKRQLVETRQITKHVAQILDSRMNTKYDENDKLIREVKVITLKSKLVSDFRKDFQFYKVREINNYHHAHDAYLNAVVGTALIKKYPKLESEFVYGDYKVYDVRKMIAKSEQEIGKATAKYFFYSNIMNFFKTEITLANGEIRKRPLIETNGETGEIVWDKGRDFATVRKVLSMPQVNIVKKTEVQTGGFSKESILPKRNSDKLIARKKDWDPKKYGGFDSPTVAYSVLVVAKVEKGKSKKLKSVKELLGITIMERSSFEKNPIDFLEAKGYKEVKKDLIIKLPKYSLFELENGRKRMLASAGELQKGNELALPSKYVNFLYLASHYEKLKGSPGSSGSETPGTSESATPESSGSEVEFSHEYWMRHALTLAKRARDEREVPVGAVLVLNNRVIGEGWNRAHAEIMALRQGGLVMQNYRLIDATLYVTFEPCVMCAGAMIHSRIGRVVFGVRNAKTGAAGSLMDVLHYPGMNHRVEITEGILADECAALLCYFFRMPRQEDNEQKQLFVEQHKHYLDEIIEQISEFSKRVILADANLDKVLSAYNKHRDKPIREQAENIIHLFTLTNLGAPAAFKYFDTTIDRKRYTSTKEVLDATLIHQSITGLYETRIDLSQLGGD

SEQ ID NO: 281 - protein, 1549 aa, synthetic construct
  REGION 1..1549: note = 111.1 Cas9 TadAins 997 polypeptide sequence
MDKKYSIGLAIGTNSVGWAVITDEYKVPSKKFKVLGNTDRHSIKKNLIGALLFDSGETAEATRLKRTARRRYTRRKNRICYLQEIFSNEMAKVDDSFFHRLEESFLVEEDKKHERHPIFGNIVDEVAYHEKYPTIYHLRKKLVDSTDKADLRLIYLALAHMIKFRGHFLIEGDLNPDNSDVDKLFIQLVQTYNQLFEENPINASGVDAKAILSARLSKSRRLENLIAQLPGEKKNGLFGNLIALSLGLTPNFKSNFDLAEDAKLQLSKDTYDDDLDNLLAQIGDQYADLFLAAKNLSDAILLSDILRVNTEITKAPLSASMIKRYDEHHQDLTLLKALVRQQLPEKYKEIFFDQSKNGYAGYIDGGASQEEFYKFIKPILEKMDGTEELLVKLNREDLLRKQRTFDNGSIPHQIHLGELHAILRRQEDFYPFLKDNREKIEKILTFRIPYYVGPLARGNSRFAWMTRKSEETITPWNFEEVVDKGASAQSFIERMTNFDKNLPNEKVLPKHSLLYEYFTVYNELTKVKYVTEGMRKPAFLSGEQKKAIVDLLFKTNRKVTVKQLKEDYFKKIECFDSVEISGVEDRFNASLGTYHDLLKIIKDKDFLDNEENEDILEDIVLTLTLFEDREMIEERLKTYAHLFDDKVMKQLKRRRYTGWGRLSRKLINGIRDKQSGKTILDFLKSDGFANRNFMQLIHDDSLTFKEDIQKAQVSGQGDSLHEHIANLAGSPAIKKGILQTVKVVDELVKVMGRHKPENIVIEMARENQTTQKGQKNSRERMKRIEEGIKELGSQILKEHPVENTQLQNEKLYLYYLQNGRDMYVDQELDINRLSDYDVDHIVPQSFLKDDSIDNKVLTRSDKNRGKSDNVPSEEVVKKMKNYWRQLLNAKLITQRKFDNLTKAERGGLSELDKAGFIKRQLVETRQITKHVAQILDSRMNTKYDENDKLIREVKVITLKSKLVSDFRKDFQFYKVREINNYHHAHDAYLNAVVGTALSHEYWMRHALTLAKRARDEREVPVGAVLVLNNRVIGEGWNRAIGLHDPTAHAEIMALRQGGLVMQNYRLIDATLYVTFEPCVMCAGAMIHSRIGRVVFGVRNAKTGAAGSLMDVLHYPGMNHRVEITEGILADECAALLCYFFRMPRQVFNAQKKAQSSTDGSSGSETPGTSESATPESSGIKKYPKLESEFVYGDYKVYDVRKMIAKSEQEIGKATAKYFFYSNIMNFFKTEITLANGEIRKRPLIETNGETGEIVWDKGRDFATVRKVLSMPQVNIVKKTEVQTGGFSKESILPKRNSDKLIARKKDWDPKKYGGFDSPTVAYSVLVVAKVEKGKSKKLKSVKELLGITIMERSSFEKNPIDFLEAKGYKEVKKDLIIKLPKYSLFELENGRKRMLASAGELQKGNELALPSKYVNFLYLASHYEKLKGSPEDNEQKQLFVEQHKHYLDEIIEQISEFSKRVILADANLDKVLSAYNKHRDKPIREQAENIIHLFTLTNLGAPAAFKYFDTTIDRKRYTSTKEVLDATLIHQSITGLYETRIDLSQLGGD

SEQ ID NO: 282 - protein, 1555 aa, synthetic construct
  REGION 1..1555: note = 111.2 Cas9 TadAins 997 polypeptide sequence
MDKKYSIGLAIGTNSVGWAVITDEYKVPSKKFKVLGNTDRHSIKKNLIGALLFDSGETAEATRLKRTARRRYTRRKNRICYLQEIFSNEMAKVDDSFFHRLEESFLVEEDKKHERHPIFGNIVDEVAYHEKYPTIYHLRKKLVDSTDKADLRLIYLALAHMIKFRGHFLIEGDLNPDNSDVDKLFIQLVQTYNQLFEENPINASGVDAKAILSARLSKSRRLENLIAQLPGEKKNGLFGNLIALSLGLTPNFKSNFDLAEDAKLQLSKDTYDDDLDNLLAQIGDQYADLFLAAKNLSDAILLSDILRVNTEITKAPLSASMIKRYDEHHQDLTLLKALVRQQLPEKYKEIFFDQSKNGYAGYIDGGASQEEFYKFIKPILEKMDGTEELLVKLNREDLLRKQRTFDNGSIPHQIHLGELHAILRRQEDFYPFLKDNREKIEKILTFRIPYYVGPLARGNSRFAWMTRKSEETITPWNFEEVVDKGASAQSFIERMTNFDKNLPNEKVLPKHSLLYEYFTVYNELTKVKYVTEGMRKPAFLSGEQKKAIVDLLFKTNRKVTVKQLKEDYFKKIECFDSVEISGVEDRFNASLGTYHDLLKIIKDKDFLDNEENEDILEDIVLTLTLFEDREMIEERLKTYAHLFDDKVMKQLKRRRYTGWGRLSRKLINGIRDKQSGKTILDFLKSDGFANRNFMQLIHDDSLTFKEDIQKAQVSGQGDSLHEHIANLAGSPAIKKGILQTVKVVDELVKVMGRHKPENIVIEMARENQTTQKGQKNSRERMKRIEEGIKELGSQILKEHPVENTQLQNEKLYLYYLQNGRDMYVDQELDINRLSDYDVDHIVPQSFLKDDSIDNKVLTRSDKNRGKSDNVPSEEVVKKMKNYWRQLLNAKLITQRKFDNLTKAERGGLSELDKAGFIKRQLVETRQITKHVAQILDSRMNTKYDENDKLIREVKVITLKSKLVSDFRKDFQFYKVREINNYHHAHDAYLNAVVGTALSHEYWMRHALTLAKRARDEREVPVGAVLVLNNRVIGEGWNRAIGLHDPTAHAEIMALRQGGLVMQNYRLIDATLYVTFEPCVMCAGAMIHSRIGRVVFGVRNAKTGAAGSLMDVLHYPGMNHRVEITEGILADECAALLCYFFRMPRQVFNAQKKAQSSTDGSSGSSGSETPGTSESATPESSGGSSIKKYPKLESEFVYGDYKVYDVRKMIAKSEQEIGKATAKYFFYSNIMNFFKTEITLANGEIRKRPLIETNGETGEIVWDKGRDFATVRKVLSMPQVNIVKKTEVQTGGFSKESILPKRNSDKLIARKKDWDPKKYGGFDSPTVAYSVLVVAKVEKGKSKKLKSVKELLGITIMERSSFEKNPIDFLEAKGYKEVKKDLIIKLPKYSLFELENGRKRMLASAGELQKGNELALPSKYVNFLYLASHYEKLKGSPEDNEQKQLFVEQHKHYLDEIIEQISEFSKRVILADANLDKVLSAYNKHRDKPIREQAENIIHLFTLTNLGAPAAFKYFDTTIDRKRYTSTKEVLDATLIHQSITGLYETRIDLSQLGGD

SEQ ID NO: 283 - protein, 1421 aa, synthetic construct
  REGION 1..1421: note = 112 delta HNH TadA polypeptide sequence
MDKKYSIGLAIGTNSVGWAVITDEYKVPSKKFKVLGNTDRHSIKKNLIGALLFDSGETAEATRLKRTARRRYTRRKNRICYLQEIFSNEMAKVDDSFFHRLEESFLVEEDKKHERHPIFGNIVDEVAYHEKYPTIYHLRKKLVDSTDKADLRLIYLALAHMIKFRGHFLIEGDLNPDNSDVDKLFIQLVQTYNQLFEENPINASGVDAKAILSARLSKSRRLENLIAQLPGEKKNGLFGNLIALSLGLTPNFKSNFDLAEDAKLQLSKDTYDDDLDNLLAQIGDQYADLFLAAKNLSDAILLSDILRVNTEITKAPLSASMIKRYDEHHQDLTLLKALVRQQLPEKYKEIFFDQSKNGYAGYIDGGASQEEFYKFIKPILEKMDGTEELLVKLNREDLLRKQRTFDNGSIPHQIHLGELHAILRRQEDFYPFLKDNREKIEKILTFRIPYYVGPLARGNSRFAWMTRKSEETITPWNFEEVVDKGASAQSFIERMTNFDKNLPNEKVLPKHSLLYEYFTVYNELTKVKYVTEGMRKPAFLSGEQKKAIVDLLFKTNRKVTVKQLKEDYFKKIECFDSVEISGVEDRFNASLGTYHDLLKIIKDKDFLDNEENEDILEDIVLTLTLFEDREMIEERLKTYAHLFDDKVMKQLKRRRYTGWGRLSRKLINGIRDKQSGKTILDFLKSDGFANRNFMQLIHDDSLTFKEDIQKAQVSGQGDSLHEHIANLAGSPAIKKGILQTVKVVDELVKVMGRHKPENIVIEMARENQTTQKGQKNSRERMKRIEEGIKELGSEVEFSHEYWMRHALTLAKRARDEREVPVGAVLVLNNRVIGEGWNRAIGLHDPTAHAEIMALRQGGLVMQNYRLIDATLYVTFEPCVMCAGAMIHSRIGRVVFGVRNAKTGAAGSLMDVLHYPGMNHRVEITEGILADECAALLCYFFRMPRQVFNAQKKAQSSTDGGLSELDKAGFIKRQLVETRQITKHVAQILDSRMNTKYDENDKLIREVKVITLKSKLVSDFRKDFQFYKVREINNYHHAHDAYLNAVVGTALIKKYPKLESEFVYGDYKVYDVRKMIAKSEQEIGKATAKYFFYSNIMNFFKTEITLANGEIRKRPLIETNGETGEIVWDKGRDFATVRKVLSMPQVNIVKKTEVQTGGFSKESILPKRNSDKLIARKKDWDPKKYGGFDSPTVAYSVLVVAKVEKGKSKKLKSVKELLGITIMERSSFEKNPIDFLEAKGYKEVKKDLIIKLPKYSLFELENGRKRMLASAGELQKGNELALPSKYVNFLYLASHYEKLKGSPEDNEQKQLFVEQHKHYLDEIIEQISEFSKRVILADANLDKVLSAYNKHRDKPIREQAENIIHLFTLTNLGAPAAFKYFDTTIDRKRYTSTKEVLDATLIHQSITGLYETRIDLSQLGGD

SEQ ID NO: 284 - protein, 1552 aa, synthetic construct
  REGION 1..1552: note = 113 N-term single TadA helixtrunc 165-end polypeptide sequence
MSEVEFSHEYWMRHALTLAKRARDEREVPVGAVLVLNNRVIGEGWNRAIGLHDPTAHAEIMALRQGGLVMQNYRLIDATLYVTFEPCVMCAGAMIHSRIGRVVFGVRNAKTGAAGSLMDVLHYPGMNHRVEITEGILADECAALLCYFFRMPRSGGSSGGSSGSETPGTSESATPESSGGSSGGSDKKYSIGLAIGTNSVGWAVITDEYKVPSKKFKVLGNTDRHSIKKNLIGALLFDSGETAEATRLKRTARRRYTRRKNRICYLQEIFSNEMAKVDDSFFHRLEESFLVEEDKKHERHPIFGNIVDEVAYHEKYPTIYHLRKKLVDSTDKADLRLIYLALAHMIKFRGHFLIEGDLNPDNSDVDKLFIQLVQTYNQLFEENPINASGVDAKAILSARLSKSRRLENLIAQLPGEKKNGLFGNLIALSLGLTPNFKSNFDLAEDAKLQLSKDTYDDDLDNLLAQIGDQYADLFLAAKNLSDAILLSDILRVNTEITKAPLSASMIKRYDEHHQDLTLLKALVRQQLPEKYKEIFFDQSKNGYAGYIDGGASQEEFYKFIKPILEKMDGTEELLVKLNREDLLRKQRTFDNGSIPHQIHLGELHAILRRQEDFYPFLKDNREKIEKILTFRIPYYVGPLARGNSRFAWMTRKSEETITPWNFEEVVDKGASAQSFIERMTNFDKNLPNEKVLPKHSLLYEYFTVYNELTKVKYVTEGMRKPAFLSGEQKKAIVDLLFKTNRKVTVKQLKEDYFKKIECFDSVEISGVEDRFNASLGTYHDLLKIIKDKDFLDNEENEDILEDIVLTLTLFEDREMIEERLKTYAHLFDDKVMKQLKRRRYTGWGRLSRKLINGIRDKQSGKTILDFLKSDGFANRNFMQLIHDDSLTFKEDIQKAQVSGQGDSLHEHIANLAGSPAIKKGILQTVKVVDELVKVMGRHKPENIVIEMARENQTTQKGQKNSRERMKRIEEGIKELGSQILKEHPVENTQLQNEKLYLYYLQNGRDMYVDQELDINRLSDYDVDHIVPQSFLKDDSIDNKVLTRSDKNRGKSDNVPSEEVVKKMKNYWRQLLNAKLITQRKFDNLTKAERGGLSELDKAGFIKRQLVETRQITKHVAQILDSRMNTKYDENDKLIREVKVITLKSKLVSDFRKDFQFYKVREINNYHHAHDAYLNAVVGTALIKKYPKLESEFVYGDYKVYDVRKMIAKSEQEIGKATAKYFFYSNIMNFFKTEITLANGEIRKRPLIETNGETGEIVWDKGRDFATVRKVLSMPQVNIVKKTEVQTGGFSKESILPKRNSDKLIARKKDWDPKKYGGFDSPTVAYSVLVVAKVEKGKSKKLKSVKELLGITIMERSSFEKNPIDFLEAKGYKEVKKDLIIKLPKYSLFELENGRKRMLASAGELQKGNELALPSKYVNFLYLASHYEKLKGSPEDNEQKQLFVEQHKHYLDEIIEQISEFSKRVILADANLDKVLSAYNKHRDKPIREQAENIIHLFTLTNLGAPAAFKYFDTTIDRKRYTSTKEVLDATLIHQSITGLYETRIDLSQLGGD

SEQ ID NO: 285 - protein, 1545 aa, synthetic construct
  REGION 1..1545: note = 114 N-term single TadA helixtrunc 165-end delta 59-65 polypeptide sequence
MSEVEFSHEYWMRHALTLAKRARDEREVPVGAVLVLNNRVIGEGWNRTAHAEIMALRQGGLVMQNYRLIDATLYVTFEPCVMCAGAMIHSRIGRVVFGVRNAKTGAAGSLMDVLHYPGMNHRVEITEGILADECAALLCYFFRMPRSGGSSGGSSGSETPGTSESATPESSGGSSGGSDKKYSIGLAIGTNSVGWAVITDEYKVPSKKFKVLGNTDRHSIKKNLIGALLFDSGETAEATRLKRTARRRYTRRKNRICYLQEIFSNEMAKVDDSFFHRLEESFLVEEDKKHERHPIFGNIVDEVAYHEKYPTIYHLRKKLVDSTDKADLRLIYLALAHMIKFRGHFLIEGDLNPDNSDVDKLFIQLVQTYNQLFEENPINASGVDAKAILSARLSKSRRLENLIAQLPGEKKNGLFGNLIALSLGLTPNFKSNFDLAEDAKLQLSKDTYDDDLDNLLAQIGDQYADLFLAAKNLSDAILLSDILRVNTEITKAPLSASMIKRYDEHHQDLTLLKALVRQQLPEKYKEIFFDQSKNGYAGYIDGGASQEEFYKFIKPILEKMDGTEELLVKLNREDLLRKQRTFDNGSIPHQIHLGELHAILRRQEDFYPFLKDNREKIEKILTFRIPYYVGPLARGNSRFAWMTRKSEETITPWNFEEVVDKGASAQSFIERMTNFDKNLPNEKVLPKHSLLYEYFTVYNELTKVKYVTEGMRKPAFLSGEQKKAIVDLLFKTNRKVTVKQLKEDYFKKIECFDSVEISGVEDRFNASLGTYHDLLKIIKDKDFLDNEENEDILEDIVLTLTLFEDREMIEERLKTYAHLFDDKVMKQLKRRRYTGWGRLSRKLINGIRDKQSGKTILDFLKSDGFANRNFMQLIHDDSLTFKEDIQKAQVSGQGDSLHEHIANLAGSPAIKKGILQTVKVVDELVKVMGRHKPENIVIEMARENQTTQKGQKNSRERMKRIEEGIKELGSQILKEHPVENTQLQNEKLYLYYLQNGRDMYVDQELDINRLSDYDVDHIVPQSFLKDDSIDNKVLTRSDKNRGKSDNVPSEEVVKKMKNYWRQLLNAKLITQRKFDNLTKAERGGLSELDKAGFIKRQLVETRQITKHVAQILDSRMNTKYDENDKLIREVKVITLKSKLVSDFRKDFQFYKVREINNYHHAHDAYLNAVVGTALIKKYPKLESEFVYGDYKVYDVRKMIAKSEQEIGKATAKYFFYSNIMNFFKTEITLANGEIRKRPLIETNGETGEIVWDKGRDFATVRKVLSMPQVNIVKKTEVQTGGFSKESILPKRNSDKLIARKKDWDPKKYGGFDSPTVAYSVLVVAKVEKGKSKKLKSVKELLGITIMERSSFEKNPIDFLEAKGYKEVKKDLIIKLPKYSLFELENGRKRMLASAGELQKGNELALPSKYVNFLYLASHYEKLKGSPEDNEQKQLFVEQHKHYLDEIIEQISEFSKRVILADANLDKVLSAYNKHRDKPIREQAENIIHLFTLTNLGAPAAFKYFDTTIDRKRYTSTKEVLDATLIHQSITGLYETRIDLSQLGGD

SEQ ID NO: 286 - protein, 1541 aa, synthetic construct
  REGION 1..1541: note = 115.1 Cas9 TadAins 1004 polypeptide sequence
MDKKYSIGLAIGTNSVGWAVITDEYKVPSKKFKVLGNTDRHSIKKNLIGALLFDSGETAEATRLKRTARRRYTRRKNRICYLQEIFSNEMAKVDDSFFHRLEESFLVEEDKKHERHPIFGNIVDEVAYHEKYPTIYHLRKKLVDSTDKADLRLIYLALAHMIKFRGHFLIEGDLNPDNSDVDKLFIQLVQTYNQLFEENPINASGVDAKAILSARLSKSRRLENLIAQLPGEKKNGLFGNLIALSLGLTPNFKSNFDLAEDAKLQLSKDTYDDDLDNLLAQIGDQYADLFLAAKNLSDAILLSDILRVNTEITKAPLSASMIKRYDEHHQDLTLLKALVRQQLPEKYKEIFFDQSKNGYAGYIDGGASQEEFYKFIKPILEKMDGTEELLVKLNREDLLRKQRTFDNGSIPHQIHLGELHAILRRQEDFYPFLKDNREKIEKILTFRIPYYVGPLARGNSRFAWMTRKSEETITPWNFEEVVDKGASAQSFIERMTNFDKNLPNEKVLPKHSLLYEYFTVYNELTKVKYVTEGMRKPAFLSGEQKKAIVDLLFKTNRKVTVKQLKEDYFKKIECFDSVEISGVEDRFNASLGTYHDLLKIIKDKDFLDNEENEDILEDIVLTLTLFEDREMIEERLKTYAHLFDDKVMKQLKRRRYTGWGRLSRKLINGIRDKQSGKTILDFLKSDGFANRNFMQLIHDDSLTFKEDIQKAQVSGQGDSLHEHIANLAGSPAIKKGILQTVKVVDELVKVMGRHKPENIVIEMARENQTTQKGQKNSRERMKRIEEGIKELGSQILKEHPVENTQLQNEKLYLYYLQNGRDMYVDQELDINRLSDYDVDHIVPQSFLKDDSIDNKVLTRSDKNRGKSDNVPSEEVVKKMKNYWRQLLNAKLITQRKFDNLTKAERGGLSELDKAGFIKRQLVETRQITKHVAQILDSRMNTKYDENDKLIREVKVITLKSKLVSDFRKDFQFYKVREINNYHHAHDAYLNAVVGTALIKKYPKGSSGSETPGTSESATPESSGSEVEFSHEYWMRHALTLAKRARDEREVPVGAVLVLNNRVIGEGWNRAIGLHDPTAHAEIMALRQGGLVMQNYRLIDATLYVTFEPCVMCAGAMIHSRIGRVVFGVRNAKTGAAGSLMDVLHYPGMNHRVEITEGILADECAALLCYFFRMPRQLESEFVYGDYKVYDVRKMIAKSEQEIGKATAKYFFYSNIMNFFKTEITLANGEIRKRPLIETNGETGEIVWDKGRDFATVRKVLSMPQVNIVKKTEVQTGGFSKESILPKRNSDKLIARKKDWDPKKYGGFDSPTVAYSVLVVAKVEKGKSKKLKSVKELLGITIMERSSFEKNPIDFLEAKGYKEVKKDLIIKLPKYSLFELENGRKRMLASAGELQKGNELALPSKYVNFLYLASHYEKLKGSPEDNEQKQLFVEQHKHYLDEIIEQISEFSKRVILADANLDKVLSAYNKHRDKPIREQAENIIHLFTLTNLGAPAAFKYFDTTIDRKRYTSTKEVLDATLIHQSITGLYETRIDLSQLGGD

SEQ ID NO: 287 - protein, 1541 aa, synthetic construct
  REGION 1..1541: note = 115.2 Cas9 TadAins 1005 polypeptide sequence
MDKKYSIGLAIGTNSVGWAVITDEYKVPSKKFKVLGNTDRHSIKKNLIGALLFDSGETAEATRLKRTARRRYTRRKNRICYLQEIFSNEMAKVDDSFFHRLEESFLVEEDKKHERHPIFGNIVDEVAYHEKYPTIYHLRKKLVDSTDKADLRLIYLALAHMIKFRGHFLIEGDLNPDNSDVDKLFIQLVQTYNQLFEENPINASGVDAKAILSARLSKSRRLENLIAQLPGEKKNGLFGNLIALSLGLTPNFKSNFDLAEDAKLQLSKDTYDDDLDNLLAQIGDQYADLFLAAKNLSDAILLSDILRVNTEITKAPLSASMIKRYDEHHQDLTLLKALVRQQLPEKYKEIFFDQSKNGYAGYIDGGASQEEFYKFIKPILEKMDGTEELLVKLNREDLLRKQRTFDNGSIPHQIHLGELHAILRRQEDFYPFLKDNREKIEKILTFRIPYYVGPLARGNSRFAWMTRKSEETITPWNFEEVVDKGASAQSFIERMTNFDKNLPNEKVLPKHSLLYEYFTVYNELTKVKYVTEGMRKPAFLSGEQKKAIVDLLFKTNRKVTVKQLKEDYFKKIECFDSVEISGVEDRFNASLGTYHDLLKIIKDKDFLDNEENEDILEDIVLTLTLFEDREMIEERLKTYAHLFDDKVMKQLKRRRYTGWGRLSRKLINGIRDKQSGKTILDFLKSDGFANRNFMQLIHDDSLTFKEDIQKAQVSGQGDSLHEHIANLAGSPAIKKGILQTVKVVDELVKVMGRHKPENIVIEMARENQTTQKGQKNSRERMKRIEEGIKELGSQILKEHPVENTQLQNEKLYLYYLQNGRDMYVDQELDINRLSDYDVDHIVPQSFLKDDSIDNKVLTRSDKNRGKSDNVPSEEVVKKMKNYWRQLLNAKLITQRKFDNLTKAERGGLSELDKAGFIKRQLVETRQITKHVAQILDSRMNTKYDENDKLIREVKVITLKSKLVSDFRKDFQFYKVREINNYHHAHDAYLNAVVGTALIKKYPKLGSSGSETPGTSESATPESSGSEVEFSHEYWMRHALTLAKRARDEREVPVGAVLVLNNRVIGEGWNRAIGLHDPTAHAEIMALRQGGLVMQNYRLIDATLYVTFEPCVMCAGAMIHSRIGRVVFGVRNAKTGAAGSLMDVLHYPGMNHRVEITEGILADECAALLCYFFRMPRQESEFVYGDYKVYDVRKMIAKSEQEIGKATAKYFFYSNIMNFFKTEITLANGEIRKRPLIETNGETGEIVWDKGRDFATVRKVLSMPQVNIVKKTEVQTGGFSKESILPKRNSDKLIARKKDWDPKKYGGFDSPTVAYSVLVVAKVEKGKSKKLKSVKELLGITIMERSSFEKNPIDFLEAKGYKEVKKDLIIKLPKYSLFELENGRKRMLASAGELQKGNELALPSKYVNFLYLASHYEKLKGSPEDNEQKQLFVEQHKHYLDEIIEQISEFSKRVILADANLDKVLSAYNKHRDKPIREQAENIIHLFTLTNLGAPAAFKYFDTTIDRKRYTSTKEVLDATLIHQSITGLYETRIDLSQLGGD

SEQ ID NO: 288 - protein, 1541 aa, synthetic construct
  REGION 1..1541: note = 115.3 Cas9 TadAins 1006 polypeptide sequence
MDKKYSIGLAIGTNSVGWAVITDEYKVPSKKFKVLGNTDRHSIKKNLIGALLFDSGETAEATRLKRTARRRYTRRKNRICYLQEIFSNEMAKVDDSFFHRLEESFLVEEDKKHERHPIFGNIVDEVAYHEKYPTIYHLRKKLVDSTDKADLRLIYLALAHMIKFRGHFLIEGDLNPDNSDVDKLFIQLVQTYNQLFEENPINASGVDAKAILSARLSKSRRLENLIAQLPGEKKNGLFGNLIALSLGLTPNFKSNFDLAEDAKLQLSKDTYDDDLDNLLAQIGDQYADLFLAAKNLSDAILLSDILRVNTEITKAPLSASMIKRYDEHHQDLTLLKALVRQQLPEKYKEIFFDQSKNGYAGYIDGGASQEEFYKFIKPILEKMDGTEELLVKLNREDLLRKQRTFDNGSIPHQIHLGELHAILRRQEDFYPFLKDNREKIEKILTFRIPYYVGPLARGNSRFAWMTRKSEETITPWNFEEVVDKGASAQSFIERMTNFDKNLPNEKVLPKHSLLYEYFTVYNELTKVKYVTEGMRKPAFLSGEQKKAIVDLLFKTNRKVTVKQLKEDYFKKIECFDSVEISGVEDRFNASLGTYHDLLKIIKDKDFLDNEENEDILEDIVLTLTLFEDREMIEERLKTYAHLFDDKVMKQLKRRRYTGWGRLSRKLINGIRDKQSGKTILDFLKSDGFANRNFMQLIHDDSLTFKEDIQKAQVSGQGDSLHEHIANLAGSPAIKKGILQTVKVVDELVKVMGRHKPENIVIEMARENQTTQKGQKNSRERMKRIEEGIKELGSQILKEHPVENTQLQNEKLYLYYLQNGRDMYVDQELDINRLSDYDVDHIVPQSFLKDDSIDNKVLTRSDKNRGKSDNVPSEEVVKKMKNYWRQLLNAKLITQRKFDNLTKAERGGLSELDKAGFIKRQLVETRQITKHVAQILDSRMNTKYDENDKLIREVKVITLKSKLVSDFRKDFQFYKVREINNYHHAHDAYLNAVVGTALIKKYPKLEGSSGSETPGTSESATPESSGSEVEFSHEYWMRHALTLAKRARDEREVPVGAVLVLNNRVIGEGWNRAIGLHDPTAHAEIMALRQGGLVMQNYRLIDATLYVTFEPCVMCAGAMIHSRIGRVVFGVRNAKTGAAGSLMDVLHYPGMNHRVEITEGILADECAALLCYFFRMPRQSEFVYGDYKVYDVRKMIAKSEQEIGKATAKYFFYSNIMNFFKTEITLANGEIRKRPLIETNGETGEIVWDKGRDFATVRKVLSMPQVNIVKKTEVQTGGFSKESILPKRNSDKLIARKKDWDPKKYGGFDSPTVAYSVLVVAKVEKGKSKKLKSVKELLGITIMERSSFEKNPIDFLEAKGYKEVKKDLIIKLPKYSLFELENGRKRMLASAGELQKGNELALPSKYVNFLYLASHYEKLKGSPEDNEQKQLFVEQHKHYLDEIIEQISEFSKRVILADANLDKVLSAYNKHRDKPIREQAENIIHLFTLTNLGAPAAFKYFDTTIDRKRYTSTKEVLDATLIHQSITGLYETRIDLSQLGGD

SEQ ID NO: 289 - protein, 1541 aa, synthetic construct
  REGION 1..1541: note = 115.4 Cas9 TadAins 1007 polypeptide sequence
MDKKYSIGLAIGTNSVGWAVITDEYKVPSKKFKVLGNTDRHSIKKNLIGALLFDSGETAEATRLKRTARRRYTRRKNRICYLQEIFSNEMAKVDDSFFHRLEESFLVEEDKKHERHPIFGNIVDEVAYHEKYPTIYHLRKKLVDSTDKADLRLIYLALAHMIKFRGHFLIEGDLNPDNSDVDKLFIQLVQTYNQLFEENPINASGVDAKAILSARLSKSRRLENLIAQLPGEKKNGLFGNLIALSLGLTPNFKSNFDLAEDAKLQLSKDTYDDDLDNLLAQIGDQYADLFLAAKNLSDAILLSDILRVNTEITKAPLSASMIKRYDEHHQDLTLLKALVRQQLPEKYKEIFFDQSKNGYAGYIDGGASQEEFYKFIKPILEKMDGTEELLVKLNREDLLRKQRTFDNGSIPHQIHLGELHAILRRQEDFYPFLKDNREKIEKILTFRIPYYVGPLARGNSRFAWMTRKSEETITPWNFEEVVDKGASAQSFIERMTNFDKNLPNEKVLPKHSLLYEYFTVYNELTKVKYVTEGMRKPAFLSGEQKKAIVDLLFKTNRKVTVKQLKEDYFKKIECFDSVEISGVEDRFNASLGTYHDLLKIIKDKDFLDNEENEDILEDIVLTLTLFEDREMIEERLKTYAHLFDDKVMKQLKRRRYTGWGRLSRKLINGIRDKQSGKTILDFLKSDGFANRNFMQLIHDDSLTFKEDIQKAQVSGQGDSLHEHIANLAGSPAIKKGILQTVKVVDELVKVMGRHKPENIVIEMARENQTTQKGQKNSRERMKRIEEGIKELGSQILKEHPVENTQLQNEKLYLYYLQNGRDMYVDQELDINRLSDYDVDHIVPQSFLKDDSIDNKVLTRSDKNRGKSDNVPSEEVVKKMKNYWRQLLNAKLITQRKFDNLTKAERGGLSELDKAGFIKRQLVETRQITKHVAQILDSRMNTKYDENDKLIREVKVITLKSKLVSDFRKDFQFYKVREINNYHHAHDAYLNAVVGTALIKKYPKLESGSSGSETPGTSESATPESSGSEVEFSHEYWMRHALTLAKRARDEREVPVGAVLVLNNRVIGEGWNRAIGLHDPTAHAEIMALRQGGLVMQNYRLIDATLYVTFEPCVMCAGAMIHSRIGRVVFGVRNAKTGAAGSLMDVLHYPGMNHRVEITEGILADECAALLCYFFRMPRQEFVYGDYKVYDVRKMIAKSEQEIGKATAKYFFYSNIMNFFKTEITLANGEIRKRPLIETNGETGEIVWDKGRDFATVRKVLSMPQVNIVKKTEVQTGGFSKESILPKRNSDKLIARKKDWDPKKYGGFDSPTVAYSVLVVAKVEKGKSKKLKSVKELLGITIMERSSFEKNPIDFLEAKGYKEVKKDLIIKLPKYSLFELENGRKRMLASAGELQKGNELALPSKYVNFLYLASHYEKLKGSPEDNEQKQLFVEQHKHYLDEIIEQISEFSKRVILADANLDKVLSAYNKHRDKPIREQAENIIHLFTLTNLGAPAAFKYFDTTIDRKRYTSTKEVLDATLIHQSITGLYETRIDLSQLGGD

SEQ ID NO: 290 - protein, 1541 aa, synthetic construct
  REGION 1..1541: note = 116.1 Cas9 TadAins C-term truncate 792 polypeptide sequence
MDKKYSIGLAIGTNSVGWAVITDEYKVPSKKFKVLGNTDRHSIKKNLIGALLFDSGETAEATRLKRTARRRYTRRKNRICYLQEIFSNEMAKVDDSFFHRLEESFLVEEDKKHERHPIFGNIVDEVAYHEKYPTIYHLRKKLVDSTDKADLRLIYLALAHMIKFRGHFLIEGDLNPDNSDVDKLFIQLVQTYNQLFEENPINASGVDAKAILSARLSKSRRLENLIAQLPGEKKNGLFGNLIALSLGLTPNFKSNFDLAEDAKLQLSKDTYDDDLDNLLAQIGDQYADLFLAAKNLSDAILLSDILRVNTEITKAPLSASMIKRYDEHHQDLTLLKALVRQQLPEKYKEIFFDQSKNGYAGYIDGGASQEEFYKFIKPILEKMDGTEELLVKLNREDLLRKQRTFDNGSIPHQIHLGELHAILRRQEDFYPFLKDNREKIEKILTFRIPYYVGPLARGNSRFAWMTRKSEETITPWNFEEVVDKGASAQSFIERMTNFDKNLPNEKVLPKHSLLYEYFTVYNELTKVKYVTEGMRKPAFLSGEQKKAIVDLLFKTNRKVTVKQLKEDYFKKIECFDSVEISGVEDRFNASLGTYHDLLKIIKDKDFLDNEENEDILEDIVLTLTLFEDREMIEERLKTYAHLFDDKVMKQLKRRRYTGWGRLSRKLINGIRDKQSGKTILDFLKSDGFANRNFMQLIHDDSLTFKEDIQKAQVSGQGDSLHEHIANLAGSPAIKKGILQTVKVVDELVKVMGRHKPENIVIEMARENQTTQKGQKNSRERMKRIEEGIKELGGSSGSETPGTSESATPESSGSEVEFSHEYWMRHALTLAKRARDEREVPVGAVLVLNNRVIGEGWNRAIGLHDPTAHAEIMALRQGGLVMQNYRLIDATLYVTFEPCVMCAGAMIHSRIGRVVFGVRNAKTGAAGSLMDVLHYPGMNHRVEITEGILADECAALLCYFFRMPRQSQILKEHPVENTQLQNEKLYLYYLQNGRDMYVDQELDINRLSDYDVDHIVPQSFLKDDSIDNKVLTRSDKNRGKSDNVPSEEVVKKMKNYWRQLLNAKLITQRKFDNLTKAERGGLSELDKAGFIKRQLVETRQITKHVAQILDSRMNTKYDENDKLIREVKVITLKSKLVSDFRKDFQFYKVREINNYHHAHDAYLNAVVGTALIKKYPKLESEFVYGDYKVYDVRKMIAKSEQEIGKATAKYFFYSNIMNFFKTEITLANGEIRKRPLIETNGETGEIVWDKGRDFATVRKVLSMPQVNIVKKTEVQTGGFSKESILPKRNSDKLIARKKDWDPKKYGGFDSPTVAYSVLVVAKVEKGKSKKLKSVKELLGITIMERSSFEKNPIDFLEAKGYKEVKKDLIIKLPKYSLFELENGRKRMLASAGELQKGNELALPSKYVNFLYLASHYEKLKGSPEDNEQKQLFVEQHKHYLDEIIEQISEFSKRVILADANLDKVLSAYNKHRDKPIREQAENIIHLFTLTNLGAPAAFKYFDTTIDRKRYTSTKEVLDATLIHQSITGLYETRIDLSQLGGD

SEQ ID NO: 291 - protein, 1541 aa, synthetic construct
  REGION 1..1541: note = 116.2 Cas9 TadAins C-term truncate 791 polypeptide sequence
MDKKYSIGLAIGTNSVGWAVITDEYKVPSKKFKVLGNTDRHSIKKNLIGALLFDSGETAEATRLKRTARRRYTRRKNRICYLQEIFSNEMAKVDDSFFHRLEESFLVEEDKKHERHPIFGNIVDEVAYHEKYPTIYHLRKKLVDSTDKADLRLIYLALAHMIKFRGHFLIEGDLNPDNSDVDKLFIQLVQTYNQLFEENPINASGVDAKAILSARLSKSRRLENLIAQLPGEKKNGLFGNLIALSLGLTPNFKSNFDLAEDAKLQLSKDTYDDDLDNLLAQIGDQYADLFLAAKNLSDAILLSDILRVNTEITKAPLSASMIKRYDEHHQDLTLLKALVRQQLPEKYKEIFFDQSKNGYAGYIDGGASQEEFYKFIKPILEKMDGTEELLVKLNREDLLRKQRTFDNGSIPHQIHLGELHAILRRQEDFYPFLKDNREKIEKILTFRIPYYVGPLARGNSRFAWMTRKSEETITPWNFEEVVDKGASAQSFIERMTNFDKNLPNEKVLPKHSLLYEYFTVYNELTKVKYVTEGMRKPAFLSGEQKKAIVDLLFKTNRKVTVKQLKEDYFKKIECFDSVEISGVEDRFNASLGTYHDLLKIIKDKDFLDNEENEDILEDIVLTLTLFEDREMIEERLKTYAHLFDDKVMKQLKRRRYTGWGRLSRKLINGIRDKQSGKTILDFLKSDGFANRNFMQLIHDDSLTFKEDIQKAQVSGQGDSLHEHIANLAGSPAIKKGILQTVKVVDELVKVMGRHKPENIVIEMARENQTTQKGQKNSRERMKRIEEGIKELGSSGSETPGTSESATPESSGSEVEFSHEYWMRHALTLAKRARDEREVPVGAVLVLNNRVIGEGWNRAIGLHDPTAHAEIMALRQGGLVMQNYRLIDATLYVTFEPCVMCAGAMIHSRIGRVVFGVRNAKTGAAGSLMDVLHYPGMNHRVEITEGILADECAALLCYFFRMPRQGSQILKEHPVENTQLQNEKLYLYYLQNGRDMYVDQELDINRLSDYDVDHIVPQSFLKDDSIDNKVLTRSDKNRGKSDNVPSEEVVKKMKNYWRQLLNAKLITQRKFDNLTKAERGGLSELDKAGFIKRQLVETRQITKHVAQILDSRMNTKYDENDKLIREVKVITLKSKLVSDFRKDFQFYKVREINNYHHAHDAYLNAVVGTALIKKYPKLESEFVYGDYKVYDVRKMIAKSEQEIGKATAKYFFYSNIMNFFKTEITLANGEIRKRPLIETNGETGEIVWDKGRDFATVRKVLSMPQVNIVKKTEVQTGGFSKESILPKRNSDKLIARKKDWDPKKYGGFDSPTVAYSVLVVAKVEKGKSKKLKSVKELLGITIMERSSFEKNPIDFLEAKGYKEVKKDLIIKLPKYSLFELENGRKRMLASAGELQKGNELALPSKYVNFLYLASHYEKLKGSPEDNEQKQLFVEQHKHYLDEIIEQISEFSKRVILADANLDKVLSAYNKHRDKPIREQAENIIHLFTLTNLGAPAAFKYFDTTIDRKRYTSTKEVLDATLIHQSITGLYETRIDLSQLGGD

SEQ ID NO: 292 - protein, 1541 aa, synthetic construct
  REGION 1..1541: note = 116.3 Cas9 TadAins C-term truncate 790 polypeptide sequence
MDKKYSIGLAIGTNSVGWAVITDEYKVPSKKFKVLGNTDRHSIKKNLIGALLFDSGETAEATRLKRTARRRYTRRKNRICYLQEIFSNEMAKVDDSFFHRLEESFLVEEDKKHERHPIFGNIVDEVAYHEKYPTIYHLRKKLVDSTDKADLRLIYLALAHMIKFRGHFLIEGDLNPDNSDVDKLFIQLVQTYNQLFEENPINASGVDAKAILSARLSKSRRLENLIAQLPGEKKNGLFGNLIALSLGLTPNFKSNFDLAEDAKLQLSKDTYDDDLDNLLAQIGDQYADLFLAAKNLSDAILLSDILRVNTEITKAPLSASMIKRYDEHHQDLTLLKALVRQQLPEKYKEIFFDQSKNGYAGYIDGGASQEEFYKFIKPILEKMDGTEELLVKLNREDLLRKQRTFDNGSIPHQIHLGELHAILRRQEDFYPFLKDNREKIEKILTFRIPYYVGPLARGNSRFAWMTRKSEETITPWNFEEVVDKGASAQSFIERMTNFDKNLPNEKVLPKHSLLYEYFTVYNELTKVKYVTEGMRKPAFLSGEQKKAIVDLLFKTNRKVTVKQLKEDYFKKIECFDSVEISGVEDRFNASLGTYHDLLKIIKDKDFLDNEENEDILEDIVLTLTLFEDREMIEERLKTYAHLFDDKVMKQLKRRRYTGWGRLSRKLINGIRDKQSGKTILDFLKSDGFANRNFMQLIHDDSLTFKEDIQKAQVSGQGDSLHEHIANLAGSPAIKKGILQTVKVVDELVKVMGRHKPENIVIEMARENQTTQKGQKNSRERMKRIEEGIKEGSSGSETPGTSESATPESSGSEVEFSHEYWMRHALTLAKRARDEREVPVGAVLVLNNRVIGEGWNRAIGLHDPTAHAEIMALRQGGLVMQNYRLIDATLYVTFEPCVMCAGAMIHSRIGRVVFGVRNAKTGAAGSLMDVLHYPGMNHRVEITEGILADECAALLCYFFRMPRQLGSQILKEHPVENTQLQNEKLYLYYLQNGRDMYVDQELDINRLSDYDVDHIVPQSFLKDDSIDNKVLTRSDKNRGKSDNVPSEEVVKKMKNYWRQLLNAKLITQRKFDNLTKAERGGLSELDKAGFIKRQLVETRQITKHVAQILDSRMNTKYDENDKLIREVKVITLKSKLVSDFRKDFQFYKVREINNYHHAHDAYLNAVVGTALIKKYPKLESEFVYGDYKVYDVRKMIAKSEQEIGKATAKYFFYSNIMNFFKTEITLANGEIRKRPLIETNGETGEIVWDKGRDFATVRKVLSMPQVNIVKKTEVQTGGFSKESILPKRNSDKLIARKKDWDPKKYGGFDSPTVAYSVLVVAKVEKGKSKKLKSVKELLGITIMERSSFEKNPIDFLEAKGYKEVKKDLIIKLPKYSLFELENGRKRMLASAGELQKGNELALPSKYVNFLYLASHYEKLKGSPEDNEQKQLFVEQHKHYLDEIIEQISEFSKRVILADANLDKVLSAYNKHRDKPIREQAENIIHLFTLTNLGAPAAFKYFDTTIDRKRYTSTKEVLDATLIHQSITGLYETRIDLSQLGGD

SEQ ID NO: 293 - protein, 1484 aa, synthetic construct
  REGION 1..1484: note = 117 Cas9 delta 1017-1069 polypeptide sequence
MDKKYSIGLAIGTNSVGWAVITDEYKVPSKKFKVLGNTDRHSIKKNLIGALLFDSGETAEATRLKRTARRRYTRRKNRICYLQEIFSNEMAKVDDSFFHRLEESFLVEEDKKHERHPIFGNIVDEVAYHEKYPTIYHLRKKLVDSTDKADLRLIYLALAHMIKFRGHFLIEGDLNPDNSDVDKLFIQLVQTYNQLFEENPINASGVDAKAILSARLSKSRRLENLIAQLPGEKKNGLFGNLIALSLGLTPNFKSNFDLAEDAKLQLSKDTYDDDLDNLLAQIGDQYADLFLAAKNLSDAILLSDILRVNTEITKAPLSASMIKRYDEHHQDLTLLKALVRQQLPEKYKEIFFDQSKNGYAGYIDGGASQEEFYKFIKPILEKMDGTEELLVKLNREDLLRKQRTFDNGSIPHQIHLGELHAILRRQEDFYPFLKDNREKIEKILTFRIPYYVGPLARGNSRFAWMTRKSEETITPWNFEEVVDKGASAQSFIERMTNFDKNLPNEKVLPKHSLLYEYFTVYNELTKVKYVTEGMRKPAFLSGEQKKAIVDLLFKTNRKVTVKQLKEDYFKKIECFDSVEISGVEDRFNASLGTYHDLLKIIKDKDFLDNEENEDILEDIVLTLTLFEDREMIEERLKTYAHLFDDKVMKQLKRRRYTGWGRLSRKLINGIRDKQSGKTILDFLKSDGFANRNFMQLIHDDSLTFKEDIQKAQVSGQGDSLHEHIANLAGSPAIKKGILQTVKVVDELVKVMGRHKPENIVIEMARENQTTQKGQKNSRERMKRIEEGIKELGSQILKEHPVENTQLQNEKLYLYYLQNGRDMYVDQELDINRLSDYDVDHIVPQSFLKDDSIDNKVLTRSDKNRGKSDNVPSEEVVKKMKNYWRQLLNAKLITQRKFDNLTKAERGGLSELDKAGFIKRQLVETRQITKHVAQILDSRMNTKYDENDKLIREVKVITLKSKLVSDFRKDFQFYKVREINNYHHAHDAYLNAVVGTALIKKYPKLESEFVYGDYKVYSSGSEVEFSHEYWMRHALTLAKRARDEREVPVGAVLVLNNRVIGEGWNRAIGLHDPTAHAEIMALRQGGLVMQNYRLIDATLYVTFEPCVMCAGAMIHSRIGRVVFGVRNAKTGAAGSLMDVLHYPGMNHRVEITEGILADECAALLCYFFRMPRQVFNAQKKAQSSTDGEIVWDKGRDFATVRKVLSMPQVNIVKKTEVQTGGFSKESILPKRNSDKLIARKKDWDPKKYGGFDSPTVAYSVLVVAKVEKGKSKKLKSVKELLGITIMERSSFEKNPIDFLEAKGYKEVKKDLIIKLPKYSLFELENGRKRMLASAGELQKGNELALPSKYVNFLYLASHYEKLKGSPEDNEQKQLFVEQHKHYLDEIIEQISEFSKRVILADANLDKVLSAYNKHRDKPIREQAENIIHLFTLTNLGAPAAFKYFDTTIDRKRYTSTKEVLDATLIHQSITGLYETRIDLSQLGGD

SEQ ID NO: 294 - protein, 1554 aa, synthetic construct
  REGION 1..1554: note = 118 Cas9 TadA-CP116ins 1067 polypeptide sequence
MDKKYSIGLAIGTNSVGWAVITDEYKVPSKKFKVLGNTDRHSIKKNLIGALLFDSGETAEATRLKRTARRRYTRRKNRICYLQEIFSNEMAKVDDSFFHRLEESFLVEEDKKHERHPIFGNIVDEVAYHEKYPTIYHLRKKLVDSTDKADLRLIYLALAHMIKFRGHFLIEGDLNPDNSDVDKLFIQLVQTYNQLFEENPINASGVDAKAILSARLSKSRRLENLIAQLPGEKKNGLFGNLIALSLGLTPNFKSNFDLAEDAKLQLSKDTYDDDLDNLLAQIGDQYADLFLAAKNLSDAILLSDILRVNTEITKAPLSASMIKRYDEHHQDLTLLKALVRQQLPEKYKEIFFDQSKNGYAGYIDGGASQEEFYKFIKPILEKMDGTEELLVKLNREDLLRKQRTFDNGSIPHQIHLGELHAILRRQEDFYPFLKDNREKIEKILTFRIPYYVGPLARGNSRFAWMTRKSEETITPWNFEEVVDKGASAQSFIERMTNFDKNLPNEKVLPKHSLLYEYFTVYNELTKVKYVTEGMRKPAFLSGEQKKAIVDLLFKTNRKVTVKQLKEDYFKKIECFDSVEISGVEDRFNASLGTYHDLLKIIKDKDFLDNEENEDILEDIVLTLTLFEDREMIEERLKTYAHLFDDKVMKQLKRRRYTGWGRLSRKLINGIRDKQSGKTILDFLKSDGFANRNFMQLIHDDSLTFKEDIQKAQVSGQGDSLHEHIANLAGSPAIKKGILQTVKVVDELVKVMGRHKPENIVIEMARENQTTQKGQKNSRERMKRIEEGIKELGSQILKEHPVENTQLQNEKLYLYYLQNGRDMYVDQELDINRLSDYDVDHIVPQSFLKDDSIDNKVLTRSDKNRGKSDNVPSEEVVKKMKNYWRQLLNAKLITQRKFDNLTKAERGGLSELDKAGFIKRQLVETRQITKHVAQILDSRMNTKYDENDKLIREVKVITLKSKLVSDFRKDFQFYKVREINNYHHAHDAYLNAVVGTALIKKYPKLESEFVYGDYKVYDVRKMIAKSEQEIGKATAKYFFYSNIMNFFKTEITLANGEIRKRPLIETNMNHRVEITEGILADECAALLCYFFRMPRQVFNAQKKAQSSTDGSSGSETPGTSESATPESSGSEVEFSHEYWMRHALTLAKRARDEREVPVGAVLVLNNRVIGEGWNRAIGLHDPTAHAEIMALRQGGLVMQNYRLIDATLYVTFEPCVMCAGAMIHSRIGRVVFGVRNAKTGAAGSLMDVLHYPGGETGEIVWDKGRDFATVRKVLSMPQVNIVKKTEVQTGGFSKESILPKRNSDKLIARKKDWDPKKYGGFDSPTVAYSVLVVAKVEKGKSKKLKSVKELLGITIMERSSFEKNPIDFLEAKGYKEVKKDLIIKLPKYSLFELENGRKRMLASAGELQKGNELALPSKYVNFLYLASHYEKLKGSPEDNEQKQLFVEQHKHYLDEIIEQISEFSKRVILADANLDKVLSAYNKHRDKPIREQAENIIHLFTLTNLGAPAAFKYFDTTIDRKRYTSTKEVLDATLIHQSITGLYETRIDLSQLGGD

SEQ ID NO: 295 - protein, 1554 aa, synthetic construct
  REGION 1..1554: note = 119 Cas9 TadAins 701 polypeptide sequence
MDKKYSIGLAIGTNSVGWAVITDEYKVPSKKFKVLGNTDRHSIKKNLIGALLFDSGETAEATRLKRTARRRYTRRKNRICYLQEIFSNEMAKVDDSFFHRLEESFLVEEDKKHERHPIFGNIVDEVAYHEKYPTIYHLRKKLVDSTDKADLRLIYLALAHMIKFRGHFLIEGDLNPDNSDVDKLFIQLVQTYNQLFEENPINASGVDAKAILSARLSKSRRLENLIAQLPGEKKNGLFGNLIALSLGLTPNFKSNFDLAEDAKLQLSKDTYDDDLDNLLAQIGDQYADLFLAAKNLSDAILLSDILRVNTEITKAPLSASMIKRYDEHHQDLTLLKALVRQQLPEKYKEIFFDQSKNGYAGYIDGGASQEEFYKFIKPILEKMDGTEELLVKLNREDLLRKQRTFDNGSIPHQIHLGELHAILRRQEDFYPFLKDNREKIEKILTFRIPYYVGPLARGNSRFAWMTRKSEETITPWNFEEVVDKGASAQSFIERMTNFDKNLPNEKVLPKHSLLYEYFTVYNELTKVKYVTEGMRKPAFLSGEQKKAIVDLLFKTNRKVTVKQLKEDYFKKIECFDSVEISGVEDRFNASLGTYHDLLKIIKDKDFLDNEENEDILEDIVLTLTLFEDREMIEERLKTYAHLFDDKVMKQLKRRRYTGWGRLSRKLINGIRDKQSGKTILDFLKSDGFANRNFMQLIHDDSGSSGSETPGTSESATPESSGSEVEFSHEYWMRHALTLAKRARDEREVPVGAVLVLNNRVIGEGWNRAIGLHDPTAHAEIMALRQGGLVMQNYRLIDATLYVTFEPCVMCAGAMIHSRIGRVVFGVRNAKTGAAGSLMDVLHYPGMNHRVEITEGILADECAALLCYFFRMPRQVFNAQKKAQSSTDLTFKEDIQKAQVSGQGDSLHEHIANLAGSPAIKKGILQTVKVVDELVKVMGRHKPENIVIEMARENQTTQKGQKNSRERMKRIEEGIKELGSQILKEHPVENTQLQNEKLYLYYLQNGRDMYVDQELDINRLSDYDVDHIVPQSFLKDDSIDNKVLTRSDKNRGKSDNVPSEEVVKKMKNYWRQLLNAKLITQRKFDNLTKAERGGLSELDKAGFIKRQLVETRQITKHVAQILDSRMNTKYDENDKLIREVKVITLKSKLVSDFRKDFQFYKVREINNYHHAHDAYLNAVVGTALIKKYPKLESEFVYGDYKVYDVRKMIAKSEQEIGKATAKYFFYSNIMNFFKTEITLANGEIRKRPLIETNGETGEIVWDKGRDFATVRKVLSMPQVNIVKKTEVQTGGFSKESILPKRNSDKLIARKKDWDPKKYGGFDSPTVAYSVLVVAKVEKGKSKKLKSVKELLGITIMERSSFEKNPIDFLEAKGYKEVKKDLIIKLPKYSLFELENGRKRMLASAGELQKGNELALPSKYVNFLYLASHYEKLKGSPEDNEQKQLFVEQHKHYLDEIIEQISEFSKRVILADANLDKVLSAYNKHRDKPIREQAENIIHLFTLTNLGAPAAFKYFDTTIDRKRYTSTKEVLDATLIHQSITGLYETRIDLSQLGGD

SEQ ID NO: 296 - protein, 1554 aa, synthetic construct
  REGION 1..1554: note = 120 Cas9 TadACP136ins 1248 polypeptide sequence
MDKKYSIGLAIGTNSVGWAVITDEYKVPSKKFKVLGNTDRHSIKKNLIGALLFDSGETAEATRLKRTARRRYTRRKNRICYLQEIFSNEMAKVDDSFFHRLEESFLVEEDKKHERHPIFGNIVDEVAYHEKYPTIYHLRKKLVDSTDKADLRLIYLALAHMIKFRGHFLIEGDLNPDNSDVDKLFIQLVQTYNQLFEENPINASGVDAKAILSARLSKSRRLENLIAQLPGEKKNGLFGNLIALSLGLTPNFKSNFDLAEDAKLQLSKDTYDDDLDNLLAQIGDQYADLFLAAKNLSDAILLSDILRVNTEITKAPLSASMIKRYDEHHQDLTLLKALVRQQLPEKYKEIFFDQSKNGYAGYIDGGASQEEFYKFIKPILEKMDGTEELLVKLNREDLLRKQRTFDNGSIPHQIHLGELHAILRRQEDFYPFLKDNREKIEKILTFRIPYYVGPLARGNSRFAWMTRKSEETITPWNFEEVVDKGASAQSFIERMTNFDKNLPNEKVLPKHSLLYEYFTVYNELTKVKYVTEGMRKPAFLSGEQKKAIVDLLFKTNRKVTVKQLKEDYFKKIECFDSVEISGVEDRFNASLGTYHDLLKIIKDKDFLDNEENEDILEDIVLTLTLFEDREMIEERLKTYAHLFDDKVMKQLKRRRYTGWGRLSRKLINGIRDKQSGKTILDFLKSDGFANRNFMQLIHDDSLTFKEDIQKAQVSGQGDSLHEHIANLAGSPAIKKGILQTVKVVDELVKVMGRHKPENIVIEMARENQTTQKGQKNSRERMKRIEEGIKELGSQILKEHPVENTQLQNEKLYLYYLQNGRDMYVDQELDINRLSDYDVDHIVPQSFLKDDSIDNKVLTRSDKNRGKSDNVPSEEVVKKMKNYWRQLLNAKLITQRKFDNLTKAERGGLSELDKAGFIKRQLVETRQITKHVAQILDSRMNTKYDENDKLIREVKVITLKSKLVSDFRKDFQFYKVREINNYHHAHDAYLNAVVGTALIKKYPKLESEFVYGDYKVYDVRKMIAKSEQEIGKATAKYFFYSNIMNFFKTEITLANGEIRKRPLIETNGETGEIVWDKGRDFATVRKVLSMPQVNIVKKTEVQTGGFSKESILPKRNSDKLIARKKDWDPKKYGGFDSPTVAYSVLVVAKVEKGKSKKLKSVKELLGITIMERSSFEKNPIDFLEAKGYKEVKKDLIIKLPKYSLFELENGRKRMLASAGELQKGNELALPSKYVNFLYLASHYEKLKGSMNHRVEITEGILADECAALLCYFFRMPRQVFNAQKKAQSSTDGSSGSETPGTSESATPESSGSEVEFSHEYWMRHALTLAKRARDEREVPVGAVLVLNNRVIGEGWNRAIGLHDPTAHAEIMALRQGGLVMQNYRLIDATLYVTFEPCVMCAGAMIHSRIGRVVFGVRNAKTGAAGSLMDVLHYPGPEDNEQKQLFVEQHKHYLDEIIEQISEFSKRVILADANLDKVLSAYNKHRDKPIREQAENIIHLFTLTNLGAPAAFKYFDTTIDRKRYTSTKEVLDATLIHQSITGLYETRIDLSQLGGD

SEQ ID NO: 297 - protein, 1554 aa, synthetic construct
  REGION 1..1554: note = 121 Cas9 TadACP136ins 1052 polypeptide sequence
MDKKYSIGLAIGTNSVGWAVITDEYKVPSKKFKVLGNTDRHSIKKNLIGALLFDSGETAEATRLKRTARRRYTRRKNRICYLQEIFSNEMAKVDDSFFHRLEESFLVEEDKKHERHPIFGNIVDEVAYHEKYPTIYHLRKKLVDSTDKADLRLIYLALAHMIKFRGHFLIEGDLNPDNSDVDKLFIQLVQTYNQLFEENPINASGVDAKAILSARLSKSRRLENLIAQLPGEKKNGLFGNLIALSLGLTPNFKSNFDLAEDAKLQLSKDTYDDDLDNLLAQIGDQYADLFLAAKNLSDAILLSDILRVNTEITKAPLSASMIKRYDEHHQDLTLLKALVRQQLPEKYKEIFFDQSKNGYAGYIDGGASQEEFYKFIKPILEKMDGTEELLVKLNREDLLRKQRTFDNGSIPHQIHLGELHAILRRQEDFYPFLKDNREKIEKILTFRIPYYVGPLARGNSRFAWMTRKSEETITPWNFEEVVDKGASAQSFIERMTNFDKNLPNEKVLPKHSLLYEYFTVYNELTKVKYVTEGMRKPAFLSGEQKKAIVDLLFKTNRKVTVKQLKEDYFKKIECFDSVEISGVEDRFNASLGTYHDLLKIIKDKDFLDNEENEDILEDIVLTLTLFEDREMIEERLKTYAHLFDDKVMKQLKRRRYTGWGRLSRKLINGIRDKQSGKTILDFLKSDGFANRNFMQLIHDDSLTFKEDIQKAQVSGQGDSLHEHIANLAGSPAIKKGILQTVKVVDELVKVMGRHKPENIVIEMARENQTTQKGQKNSRERMKRIEEGIKELGSQILKEHPVENTQLQNEKLYLYYLQNGRDMYVDQELDINRLSDYDVDHIVPQSFLKDDSIDNKVLTRSDKNRGKSDNVPSEEVVKKMKNYWRQLLNAKLITQRKFDNLTKAERGGLSELDKAGFIKRQLVETRQITKHVAQILDSRMNTKYDENDKLIREVKVITLKSKLVSDFRKDFQFYKVREINNYHHAHDAYLNAVVGTALIKKYPKLESEFVYGDYKVYDVRKMIAKSEQEIGKATAKYFFYSNIMNFFKTEITLAMNHRVEITEGILADECAALLCYFFRMPRQVFNAQKKAQSSTDGSSGSETPGTSESATPESSGSEVEFSHEYWMRHALTLAKRARDEREVPVGAVLVLNNRVIGEGWNRAIGLHDPTAHAEIMALRQGGLVMQNYRLIDATLYVTFEPCVMCAGAMIHSRIGRVVFGVRNAKTGAAGSLMDVLHYPGNGEIRKRPLIETNGETGEIVWDKGRDFATVRKVLSMPQVNIVKKTEVQTGGFSKESILPKRNSDKLIARKKDWDPKKYGGFDSPTVAYSVLVVAKVEKGKSKKLKSVKELLGITIMERSSFEKNPIDFLEAKGYKEVKKDLIIKLPKYSLFELENGRKRMLASAGELQKGNELALPSKYVNFLYLASHYEKLKGSPEDNEQKQLFVEQHKHYLDEIIEQISEFSKRVILADANLDKVLSAYNKHRDKPIREQAENIIHLFTLTNLGAPAAFKYFDTTIDRKRYTSTKEVLDATLIHQSITGLYETRIDLSQLGGD

SEQ ID NO: 298 - protein, 1554 aa, synthetic construct
  REGION 1..1554: note = 122 Cas9 TadACP136ins 1041 polypeptide sequence
MDKKYSIGLAIGTNSVGWAVITDEYKVPSKKFKVLGNTDRHSIKKNLIGALLFDSGETAEATRLKRTARRRYTRRKNRICYLQEIFSNEMAKVDDSFFHRLEESFLVEEDKKHERHPIFGNIVDEVAYHEKYPTIYHLRKKLVDSTDKADLRLIYLALAHMIKFRGHFLIEGDLNPDNSDVDKLFIQLVQTYNQLFEENPINASGVDAKAILSARLSKSRRLENLIAQLPGEKKNGLFGNLIALSLGLTPNFKSNFDLAEDAKLQLSKDTYDDDLDNLLAQIGDQYADLFLAAKNLSDAILLSDILRVNTEITKAPLSASMIKRYDEHHQDLTLLKALVRQQLPEKYKEIFFDQSKNGYAGYIDGGASQEEFYKFIKPILEKMDGTEELLVKLNREDLLRKQRTFDNGSIPHQIHLGELHAILRRQEDFYPFLKDNREKIEKILTFRIPYYVGPLARGNSRFAWMTRKSEETITPWNFEEVVDKGASAQSFIERMTNFDKNLPNEKVLPKHSLLYEYFTVYNELTKVKYVTEGMRKPAFLSGEQKKAIVDLLFKTNRKVTVKQLKEDYFKKIECFDSVEISGVEDRFNASLGTYHDLLKIIKDKDFLDNEENEDILEDIVLTLTLFEDREMIEERLKTYAHLFDDKVMKQLKRRRYTGWGRLSRKLINGIRDKQSGKTILDFLKSDGFANRNFMQLIHDDSLTFKEDIQKAQVSGQGDSLHEHIANLAGSPAIKKGILQTVKVVDELVKVMGRHKPENIVIEMARENQTTQKGQKNSRERMKRIEEGIKELGSQILKEHPVENTQLQNEKLYLYYLQNGRDMYVDQELDINRLSDYDVDHIVPQSFLKDDSIDNKVLTRSDKNRGKSDNVPSEEVVKKMKNYWRQLLNAKLITQRKFDNLTKAERGGLSELDKAGFIKRQLVETRQITKHVAQILDSRMNTKYDENDKLIREVKVITLKSKLVSDFRKDFQFYKVREINNYHHAHDAYLNAVVGTALIKKYPKLESEFVYGDYKVYDVRKMIAKSEQEIGKATAKYFFYSMNHRVEITEGILADECAALLCYFFRMPRQVFNAQKKAQSSTDGSSGSETPGTSESATPESSGSEVEFSHEYWMRHALTLAKRARDEREVPVGAVLVLNNRVIGEGWNRAIGLHDPTAHAEIMALRQGGLVMQNYRLIDATLYVTFEPCVMCAGAMIHSRIGRVVFGVRNAKTGAAGSLMDVLHYPGNIMNFFKTEITLANGEIRKRPLIETNGETGEIVWDKGRDFATVRKVLSMPQVNIVKKTEVQTGGFSKESILPKRNSDKLIARKKDWDPKKYGGFDSPTVAYSVLVVAKVEKGKSKKLKSVKELLGITIMERSSFEKNPIDFLEAKGYKEVKKDLIIKLPKYSLFELENGRKRMLASAGELQKGNELALPSKYVNFLYLASHYEKLKGSPEDNEQKQLFVEQHKHYLDEIIEQISEFSKRVILADANLDKVLSAYNKHRDKPIREQAENIIHLFTLTNLGAPAAFKYFDTTIDRKRYTSTKEVLDATLIHQSITGLYETRIDLSQLGGD

SEQ ID NO: 299 - protein, 1554 aa, synthetic construct
  REGION 1..1554: note = 123 Cas9 TadACP139ins 1299 polypeptide sequence
MDKKYSIGLAIGTNSVGWAVITDEYKVPSKKFKVLGNTDRHSIKKNLIGALLFDSGETAEATRLKRTARRRYTRRKNRICYLQEIFSNEMAKVDDSFFHRLEESFLVEEDKKHERHPIFGNIVDEVAYHEKYPTIYHLRKKLVDSTDKADLRLIYLALAHMIKFRGHFLIEGDLNPDNSDVDKLFIQLVQTYNQLFEENPINASGVDAKAILSARLSKSRRLENLIAQLPGEKKNGLFGNLIALSLGLTPNFKSNFDLAEDAKLQLSKDTYDDDLDNLLAQIGDQYADLFLAAKNLSDAILLSDILRVNTEITKAPLSASMIKRYDEHHQDLTLLKALVRQQLPEKYKEIFFDQSKNGYAGYIDGGASQEEFYKFIKPILEKMDGTEELLVKLNREDLLRKQRTFDNGSIPHQIHLGELHAILRRQEDFYPFLKDNREKIEKILTFRIPYYVGPLARGNSRFAWMTRKSEETITPWNFEEVVDKGASAQSFIERMTNFDKNLPNEKVLPKHSLLYEYFTVYNELTKVKYVTEGMRKPAFLSGEQKKAIVDLLFKTNRKVTVKQLKEDYFKKIECFDSVEISGVEDRFNASLGTYHDLLKIIKDKDFLDNEENEDILEDIVLTLTLFEDREMIEERLKTYAHLFDDKVMKQLKRRRYTGWGRLSRKLINGIRDKQSGKTILDFLKSDGFANRNFMQLIHDDSLTFKEDIQKAQVSGQGDSLHEHIANLAGSPAIKKGILQTVKVVDELVKVMGRHKPENIVIEMARENQTTQKGQKNSRERMKRIEEGIKELGSQILKEHPVENTQLQNEKLYLYYLQNGRDMYVDQELDINRLSDYDVDHIVPQSFLKDDSIDNKVLTRSDKNRGKSDNVPSEEVVKKMKNYWRQLLNAKLITQRKFDNLTKAERGGLSELDKAGFIKRQLVETRQITKHVAQILDSRMNTKYDENDKLIREVKVITLKSKLVSDFRKDFQFYKVREINNYHHAHDAYLNAVVGTALIKKYPKLESEFVYGDYKVYDVRKMIAKSEQEIGKATAKYFFYSNIMNFFKTEITLANGEIRKRPLIETNGETGEIVWDKGRDFATVRKVLSMPQVNIVKKTEVQTGGFSKESILPKRNSDKLIARKKDWDPKKYGGFDSPTVAYSVLVVAKVEKGKSKKLKSVKELLGITIMERSSFEKNPIDFLEAKGYKEVKKDLIIKLPKYSLFELENGRKRMLASAGELQKGNELALPSKYVNFLYLASHYEKLKGSPEDNEQKQLFVEQHKHYLDEIIEQISEFSKRVILADANLDKVLSAYNKHRMNHRVEITEGILADECAALLCYFFRMPRQVFNAQKKAQSSTDGSSGSETPGTSESATPESSGSEVEFSHEYWMRHALTLAKRARDEREVPVGAVLVLNNRVIGEGWNRAIGLHDPTAHAEIMALRQGGLVMQNYRLIDATLYVTFEPCVMCAGAMIHSRIGRVVFGVRNAKTGAAGSLMDVLHYPGDKPIREQAENIIHLFTLTNLGAPAAFKYFDTTIDRKRYTSTKEVLDATLIHQSITGLYETRIDLSQLGGD

SEQ ID NO: 300 - protein, 1454 aa, synthetic construct
  REGION 1..1454: note = 124 Cas9 delta 792-872TadAins polypeptide sequence
MDKKYSIGLAIGTNSVGWAVITDEYKVPSKKFKVLGNTDRHSIKKNLIGALLFDSGETAEATRLKRTARRRYTRRKNRICYLQEIFSNEMAKVDDSFFHRLEESFLVEEDKKHERHPIFGNIVDEVAYHEKYPTIYHLRKKLVDSTDKADLRLIYLALAHMIKFRGHFLIEGDLNPDNSDVDKLFIQLVQTYNQLFEENPINASGVDAKAILSARLSKSRRLENLIAQLPGEKKNGLFGNLIALSLGLTPNFKSNFDLAEDAKLQLSKDTYDDDLDNLLAQIGDQYADLFLAAKNLSDAILLSDILRVNTEITKAPLSASMIKRYDEHHQDLTLLKALVRQQLPEKYKEIFFDQSKNGYAGYIDGGASQEEFYKFIKPILEKMDGTEELLVKLNREDLLRKQRTFDNGSIPHQIHLGELHAILRRQEDFYPFLKDNREKIEKILTFRIPYYVGPLARGNSRFAWMTRKSEETITPWNFEEVVDKGASAQSFIERMTNFDKNLPNEKVLPKHSLLYEYFTVYNELTKVKYVTEGMRKPAFLSGEQKKAIVDLLFKTNRKVTVKQLKEDYFKKIECFDSVEISGVEDRFNASLGTYHDLLKIIKDKDFLDNEENEDILEDIVLTLTLFEDREMIEERLKTYAHLFDDKVMKQLKRRRYTGWGRLSRKLINGIRDKQSGKTILDFLKSDGFANRNFMQLIHDDSLTFKEDIQKAQVSGQGDSLHEHIANLAGSPAIKKGILQTVKVVDELVKVMGRHKPENIVIEMARENQTTQKGQKNSRERMKRIEEGIKELGSEVEFSHEYWMRHALTLAKRARDEREVPVGAVLVLNNRVIGEGWNRAIGLHDPTAHAEIMALRQGGLVMQNYRLIDATLYVTFEPCVMCAGAMIHSRIGRVVFGVRNAKTGAAGSLMDVLHYPGMNHRVEITEGILADECAALLCYFFRMPRQVFNAQKKAQSSTDEEVVKKMKNYWRQLLNAKLITQRKFDNLTKAERGGLSELDKAGFIKRQLVETRQITKHVAQILDSRMNTKYDENDKLIREVKVITLKSKLVSDFRKDFQFYKVREINNYHHAHDAYLNAVVGTALIKKYPKLESEFVYGDYKVYDVRKMIAKSEQEIGKATAKYFFYSNIMNFFKTEITLANGEIRKRPLIETNGETGEIVWDKGRDFATVRKVLSMPQVNIVKKTEVQTGGFSKESILPKRNSDKLIARKKDWDPKKYGGFDSPTVAYSVLVVAKVEKGKSKKLKSVKELLGITIMERSSFEKNPIDFLEAKGYKEVKKDLIIKLPKYSLFELENGRKRMLASAGELQKGNELALPSKYVNFLYLASHYEKLKGSPEDNEQKQLFVEQHKHYLDEIIEQISEFSKRVILADANLDKVLSAYNKHRDKPIREQAENIIHLFTLTNLGAPAAFKYFDTTIDRKRYTSTKEVLDATLIHQSITGLYETRIDLSQLGGD

SEQ ID NO: 301 - protein, 1420 aa, synthetic construct
  REGION 1..1420: note = 125 Cas9 delta 792-906TadAins polypeptide sequence
MDKKYSIGLAIGTNSVGWAVITDEYKVPSKKFKVLGNTDRHSIKKNLIGALLFDSGETAEATRLKRTARRRYTRRKNRICYLQEIFSNEMAKVDDSFFHRLEESFLVEEDKKHERHPIFGNIVDEVAYHEKYPTIYHLRKKLVDSTDKADLRLIYLALAHMIKFRGHFLIEGDLNPDNSDVDKLFIQLVQTYNQLFEENPINASGVDAKAILSARLSKSRRLENLIAQLPGEKKNGLFGNLIALSLGLTPNFKSNFDLAEDAKLQLSKDTYDDDLDNLLAQIGDQYADLFLAAKNLSDAILLSDILRVNTEITKAPLSASMIKRYDEHHQDLTLLKALVRQQLPEKYKEIFFDQSKNGYAGYIDGGASQEEFYKFIKPILEKMDGTEELLVKLNREDLLRKQRTFDNGSIPHQIHLGELHAILRRQEDFYPFLKDNREKIEKILTFRIPYYVGPLARGNSRFAWMTRKSEETITPWNFEEVVDKGASAQSFIERMTNFDKNLPNEKVLPKHSLLYEYFTVYNELTKVKYVTEGMRKPAFLSGEQKKAIVDLLFKTNRKVTVKQLKEDYFKKIECFDSVEISGVEDRFNASLGTYHDLLKIIKDKDFLDNEENEDILEDIVLTLTLFEDREMIEERLKTYAHLFDDKVMKQLKRRRYTGWGRLSRKLINGIRDKQSGKTILDFLKSDGFANRNFMQLIHDDSLTFKEDIQKAQVSGQGDSLHEHIANLAGSPAIKKGILQTVKVVDELVKVMGRHKPENIVIEMARENQTTQKGQKNSRERMKRIEEGIKELGSEVEFSHEYWMRHALTLAKRARDEREVPVGAVLVLNNRVIGEGWNRAIGLHDPTAHAEIMALRQGGLVMQNYRLIDATLYVTFEPCVMCAGAMIHSRIGRVVFGVRNAKTGAAGSLMDVLHYPGMNHRVEITEGILADECAALLCYFFRMPRQVFNAQKKAQSSTDGLSELDKAGFIKRQLVETRQITKHVAQILDSRMNTKYDENDKLIREVKVITLKSKLVSDFRKDFQFYKVREINNYHHAHDAYLNAVVGTALIKKYPKLESEFVYGDYKVYDVRKMIAKSEQEIGKATAKYFFYSNIMNFFKTEITLANGEIRKRPLIETNGETGEIVWDKGRDFATVRKVLSMPQVNIVKKTEVQTGGFSKESILPKRNSDKLIARKKDWDPKKYGGFDSPTVAYSVLVVAKVEKGKSKKLKSVKELLGITIMERSSFEKNPIDFLEAKGYKEVKKDLIIKLPKYSLFELENGRKRMLASAGELQKGNELALPSKYVNFLYLASHYEKLKGSPEDNEQKQLFVEQHKHYLDEIIEQISEFSKRVILADANLDKVLSAYNKHRDKPIREQAENIIHLFTLTNLGAPAAFKYFDTTIDRKRYTSTKEVLDATLIHQSITGLYETRIDLSQLGGD

SEQ ID NO: 302 - protein, 1554 aa, synthetic construct
  REGION 1..1554: note = 126 TadA CP65ins 1003 polypeptide sequence
MDKKYSIGLAIGTNSVGWAVITDEYKVPSKKFKVLGNTDRHSIKKNLIGALLFDSGETAEATRLKRTARRRYTRRKNRICYLQEIFSNEMAKVDDSFFHRLEESFLVEEDKKHERHPIFGNIVDEVAYHEKYPTIYHLRKKLVDSTDKADLRLIYLALAHMIKFRGHFLIEGDLNPDNSDVDKLFIQLVQTYNQLFEENPINASGVDAKAILSARLSKSRRLENLIAQLPGEKKNGLFGNLIALSLGLTPNFKSNFDLAEDAKLQLSKDTYDDDLDNLLAQIGDQYADLFLAAKNLSDAILLSDILRVNTEITKAPLSASMIKRYDEHHQDLTLLKALVRQQLPEKYKEIFFDQSKNGYAGYIDGGASQEEFYKFIKPILEKMDGTEELLVKLNREDLLRKQRTFDNGSIPHQIHLGELHAILRRQEDFYPFLKDNREKIEKILTFRIPYYVGPLARGNSRFAWMTRKSEETITPWNFEEVVDKGASAQSFIERMTNFDKNLPNEKVLPKHSLLYEYFTVYNELTKVKYVTEGMRKPAFLSGEQKKAIVDLLFKTNRKVTVKQLKEDYFKKIECFDSVEISGVEDRFNASLGTYHDLLKIIKDKDFLDNEENEDILEDIVLTLTLFEDREMIEERLKTYAHLFDDKVMKQLKRRRYTGWGRLSRKLINGIRDKQSGKTILDFLKSDGFANRNFMQLIHDDSLTFKEDIQKAQVSGQGDSLHEHIANLAGSPAIKKGILQTVKVVDELVKVMGRHKPENIVIEMARENQTTQKGQKNSRERMKRIEEGIKELGSQILKEHPVENTQLQNEKLYLYYLQNGRDMYVDQELDINRLSDYDVDHIVPQSFLKDDSIDNKVLTRSDKNRGKSDNVPSEEVVKKMKNYWRQLLNAKLITQRKFDNLTKAERGGLSELDKAGFIKRQLVETRQITKHVAQILDSRMNTKYDENDKLIREVKVITLKSKLVSDFRKDFQFYKVREINNYHHAHDAYLNAVVGTALIKKYPKTAHAEIMALRQGGLVMQNYRLIDATLYVTFEPCVMCAGAMIHSRIGRVVFGVRNAKTGAAGSLMDVLHYPGMNHRVEITEGILADECAALLCYFFRMPRQVFNAQKKAQSSTDGSSGSETPGTSESATPESSGSEVEFSHEYWMRHALTLAKRARDEREVPVGAVLVLNNRVIGEGWNRAIGLHDPLESEFVYGDYKVYDVRKMIAKSEQEIGKATAKYFFYSNIMNFFKTEITLANGEIRKRPLIETNGETGEIVWDKGRDFATVRKVLSMPQVNIVKKTEVQTGGFSKESILPKRNSDKLIARKKDWDPKKYGGFDSPTVAYSVLVVAKVEKGKSKKLKSVKELLGITIMERSSFEKNPIDFLEAKGYKEVKKDLIIKLPKYSLFELENGRKRMLASAGELQKGNELALPSKYVNFLYLASHYEKLKGSPEDNEQKQLFVEQHKHYLDEIIEQISEFSKRVILADANLDKVLSAYNKHRDKPIREQAENIIHLFTLTNLGAPAAFKYFDTTIDRKRYTSTKEVLDATLIHQSITGLYETRIDLSQLGGD

SEQ ID NO: 303 - protein, 1554 aa, synthetic construct
  REGION 1..1554: note = 127 TadA CP65ins 1016 polypeptide sequence
MDKKYSIGLAIGTNSVGWAVITDEYKVPSKKFKVLGNTDRHSIKKNLIGALLFDSGETAEATRLKRTARRRYTRRKNRICYLQEIFSNEMAKVDDSFFHRLEESFLVEEDKKHERHPIFGNIVDEVAYHEKYPTIYHLRKKLVDSTDKADLRLIYLALAHMIKFRGHFLIEGDLNPDNSDVDKLFIQLVQTYNQLFEENPINASGVDAKAILSARLSKSRRLENLIAQLPGEKKNGLFGNLIALSLGLTPNFKSNFDLAEDAKLQLSKDTYDDDLDNLLAQIGDQYADLFLAAKNLSDAILLSDILRVNTEITKAPLSASMIKRYDEHHQDLTLLKALVRQQLPEKYKEIFFDQSKNGYAGYIDGGASQEEFYKFIKPILEKMDGTEELLVKLNREDLLRKQRTFDNGSIPHQIHLGELHAILRRQEDFYPFLKDNREKIEKILTFRIPYYVGPLARGNSRFAWMTRKSEETITPWNFEEVVDKGASAQSFIERMTNFDKNLPNEKVLPKHSLLYEYFTVYNELTKVKYVTEGMRKPAFLSGEQKKAIVDLLFKTNRKVTVKQLKEDYFKKIECFDSVEISGVEDRFNASLGTYHDLLKIIKDKDFLDNEENEDILEDIVLTLTLFEDREMIEERLKTYAHLFDDKVMKQLKRRRYTGWGRLSRKLINGIRDKQSGKTILDFLKSDGFANRNFMQLIHDDSLTFKEDIQKAQVSGQGDSLHEHIANLAGSPAIKKGILQTVKVVDELVKVMGRHKPENIVIEMARENQTTQKGQKNSRERMKRIEEGIKELGSQILKEHPVENTQLQNEKLYLYYLQNGRDMYVDQELDINRLSDYDVDHIVPQSFLKDDSIDNKVLTRSDKNRGKSDNVPSEEVVKKMKNYWRQLLNAKLITQRKFDNLTKAERGGLSELDKAGFIKRQLVETRQITKHVAQILDSRMNTKYDENDKLIREVKVITLKSKLVSDFRKDFQFYKVREINNYHHAHDAYLNAVVGTALIKKYPKLESEFVYGDYKVTAHAEIMALRQGGLVMQNYRLIDATLYVTFEPCVMCAGAMIHSRIGRVVFGVRNAKTGAAGSLMDVLHYPGMNHRVEITEGILADECAALLCYFFRMPRQVFNAQKKAQSSTDGSSGSETPGTSESATPESSGSEVEFSHEYWMRHALTLAKRARDEREVPVGAVLVLNNRVIGEGWNRAIGLHDPYDVRKMIAKSEQEIGKATAKYFFYSNIMNFFKTEITLANGEIRKRPLIETNGETGEIVWDKGRDFATVRKVLSMPQVNIVKKTEVQTGGFSKESILPKRNSDKLIARKKDWDPKKYGGFDSPTVAYSVLVVAKVEKGKSKKLKSVKELLGITIMERSSFEKNPIDFLEAKGYKEVKKDLIIKLPKYSLFELENGRKRMLASAGELQKGNELALPSKYVNFLYLASHYEKLKGSPEDNEQKQLFVEQHKHYLDEIIEQISEFSKRVILADANLDKVLSAYNKHRDKPIREQAENIIHLFTLTNLGAPAAFKYFDTTIDRKRYTSTKEVLDATLIHQSITGLYETRIDLSQLGGD

SEQ ID NO: 304 - protein, 1554 aa, synthetic construct
  REGION 1..1554: note = 128 TadA CP65ins 1022 polypeptide sequence
MDKKYSIGLAIGTNSVGWAVITDEYKVPSKKFKVLGNTDRHSIKKNLIGALLFDSGETAEATRLKRTARRRYTRRKNRICYLQEIFSNEMAKVDDSFFHRLEESFLVEEDKKHERHPIFGNIVDEVAYHEKYPTIYHLRKKLVDSTDKADLRLIYLALAHMIKFRGHFLIEGDLNPDNSDVDKLFIQLVQTYNQLFEENPINASGVDAKAILSARLSKSRRLENLIAQLPGEKKNGLFGNLIALSLGLTPNFKSNFDLAEDAKLQLSKDTYDDDLDNLLAQIGDQYADLFLAAKNLSDAILLSDILRVNTEITKAPLSASMIKRYDEHHQDLTLLKALVRQQLPEKYKEIFFDQSKNGYAGYIDGGASQEEFYKFIKPILEKMDGTEELLVKLNREDLLRKQRTFDNGSIPHQIHLGELHAILRRQEDFYPFLKDNREKIEKILTFRIPYYVGPLARGNSRFAWMTRKSEETITPWNFEEVVDKGASAQSFIERMTNFDKNLPNEKVLPKHSLLYEYFTVYNELTKVKYVTEGMRKPAFLSGEQKKAIVDLLFKTNRKVTVKQLKEDYFKKIECFDSVEISGVEDRFNASLGTYHDLLKIIKDKDFLDNEENEDILEDIVLTLTLFEDREMIEERLKTYAHLFDDKVMKQLKRRRYTGWGRLSRKLINGIRDKQSGKTILDFLKSDGFANRNFMQLIHDDSLTFKEDIQKAQVSGQGDSLHEHIANLAGSPAIKKGILQTVKVVDELVKVMGRHKPENIVIEMARENQTTQKGQKNSRERMKRIEEGIKELGSQILKEHPVENTQLQNEKLYLYYLQNGRDMYVDQELDINRLSDYDVDHIVPQSFLKDDSIDNKVLTRSDKNRGKSDNVPSEEVVKKMKNYWRQLLNAKLITQRKFDNLTKAERGGLSELDKAGFIKRQLVETRQITKHVAQILDSRMNTKYDENDKLIREVKVITLKSKLVSDFRKDFQFYKVREINNYHHAHDAYLNAVVGTALIKKYPKLESEFVYGDYKVYDVRKMITAHAEIMALRQGGLVMQNYRLIDATLYVTFEPCVMCAGAMIHSRIGRVVFGVRNAKTGAAGSLMDVLHYPGMNHRVEITEGILADECAALLCYFFRMPRQVFNAQKKAQSSTDGSSGSETPGTSESATPESSGSEVEFSHEYWMRHALTLAKRARDEREVPVGAVLVLNNRVIGEGWNRAIGLHDPAKSEQEIGKATAKYFFYSNIMNFFKTEITLANGEIRKRPLIETNGETGEIVWDKGRDFATVRKVLSMPQVNIVKKTEVQTGGFSKESILPKRNSDKLIARKKDWDPKKYGGFDSPTVAYSVLVVAKVEKGKSKKLKSVKELLGITIMERSSFEKNPIDFLEAKGYKEVKKDLIIKLPKYSLFELENGRKRMLASAGELQKGNELALPSKYVNFLYLASHYEKLKGSPEDNEQKQLFVEQHKHYLDEIIEQISEFSKRVILADANLDKVLSAYNKHRDKPIREQAENIIHLFTLTNLGAPAAFKYFDTTIDRKRYTSTKEVLDATLIHQSITGLYETRIDLSQLGGD

SEQ ID NO: 305 - protein, 1554 aa, synthetic construct
  REGION 1..1554: note = 129 TadA CP65ins 1029 polypeptide sequence
MDKKYSIGLAIGTNSVGWAVITDEYKVPSKKFKVLGNTDRHSIKKNLIGALLFDSGETAEATRLKRTARRRYTRRKNRICYLQEIFSNEMAKVDDSFFHRLEESFLVEEDKKHERHPIFGNIVDEVAYHEKYPTIYHLRKKLVDSTDKADLRLIYLALAHMIKFRGHFLIEGDLNPDNSDVDKLFIQLVQTYNQLFEENPINASGVDAKAILSARLSKSRRLENLIAQLPGEKKNGLFGNLIALSLGLTPNFKSNFDLAEDAKLQLSKDTYDDDLDNLLAQIGDQYADLFLAAKNLSDAILLSDILRVNTEITKAPLSASMIKRYDEHHQDLTLLKALVRQQLPEKYKEIFFDQSKNGYAGYIDGGASQEEFYKFIKPILEKMDGTEELLVKLNREDLLRKQRTFDNGSIPHQIHLGELHAILRRQEDFYPFLKDNREKIEKILTFRIPYYVGPLARGNSRFAWMTRKSEETITPWNFEEVVDKGASAQSFIERMTNFDKNLPNEKVLPKHSLLYEYFTVYNELTKVKYVTEGMRKPAFLSGEQKKAIVDLLFKTNRKVTVKQLKEDYFKKIECFDSVEISGVEDRFNASLGTYHDLLKIIKDKDFLDNEENEDILEDIVLTLTLFEDREMIEERLKTYAHLFDDKVMKQLKRRRYTGWGRLSRKLINGIRDKQSGKTILDFLKSDGFANRNFMQLIHDDSLTFKEDIQKAQVSGQGDSLHEHIANLAGSPAIKKGILQTVKVVDELVKVMGRHKPENIVIEMARENQTTQKGQKNSRERMKRIEEGIKELGSQILKEHPVENTQLQNEKLYLYYLQNGRDMYVDQELDINRLSDYDVDHIVPQSFLKDDSIDNKVLTRSDKNRGKSDNVPSEEVVKKMKNYWRQLLNAKLITQRKFDNLTKAERGGLSELDKAGFIKRQLVETRQITKHVAQILDSRMNTKYDENDKLIREVKVITLKSKLVSDFRKDFQFYKVREINNYHHAHDAYLNAVVGTALIKKYPKLESEFVYGDYKVYDVRKMIAKSEQEITAHAEIMALRQGGLVMQNYRLIDATLYVTFEPCVMCAGAMIHSRIGRVVFGVRNAKTGAAGSLMDVLHYPGMNHRVEITEGILADECAALLCYFFRMPRQVFNAQKKAQSSTDGSSGSETPGTSESATPESSGSEVEFSHEYWMRHALTLAKRARDEREVPVGAVLVLNNRVIGEGWNRAIGLHDPGKATAKYFFYSNIMNFFKTEITLANGEIRKRPLIETNGETGEIVWDKGRDFATVRKVLSMPQVNIVKKTEVQTGGFSKESILPKRNSDKLIARKKDWDPKKYGGFDSPTVAYSVLVVAKVEKGKSKKLKSVKELLGITIMERSSFEKNPIDFLEAKGYKEVKKDLIIKLPKYSLFELENGRKRMLASAGELQKGNELALPSKYVNFLYLASHYEKLKGSPEDNEQKQLFVEQHKHYLDEIIEQISEFSKRVILADANLDKVLSAYNKHRDKPIREQAENIIHLFTLTNLGAPAAFKYFDTTIDRKRYTSTKEVLDATLIHQSITGLYETRIDLSQLGGD

SEQ ID NO: 306 - protein, 1554 aa, synthetic construct
  REGION 1..1554: note = 130 TadA CP65ins 1041 polypeptide sequence
MDKKYSIGLAIGTNSVGWAVITDEYKVPSKKFKVLGNTDRHSIKKNLIGALLFDSGETAEATRLKRTARRRYTRRKNRICYLQEIFSNEMAKVDDSFFHRLEESFLVEEDKKHERHPIFGNIVDEVAYHEKYPTIYHLRKKLVDSTDKADLRLIYLALAHMIKFRGHFLIEGDLNPDNSDVDKLFIQLVQTYNQLFEENPINASGVDAKAILSARLSKSRRLENLIAQLPGEKKNGLFGNLIALSLGLTPNFKSNFDLAEDAKLQLSKDTYDDDLDNLLAQIGDQYADLFLAAKNLSDAILLSDILRVNTEITKAPLSASMIKRYDEHHQDLTLLKALVRQQLPEKYKEIFFDQSKNGYAGYIDGGASQEEFYKFIKPILEKMDGTEELLVKLNREDLLRKQRTFDNGSIPHQIHLGELHAILRRQEDFYPFLKDNREKIEKILTFRIPYYVGPLARGNSRFAWMTRKSEETITPWNFEEVVDKGASAQSFIERMTNFDKNLPNEKVLPKHSLLYEYFTVYNELTKVKYVTEGMRKPAFLSGEQKKAIVDLLFKTNRKVTVKQLKEDYFKKIECFDSVEISGVEDRFNASLGTYHDLLKIIKDKDFLDNEENEDILEDIVLTLTLFEDREMIEERLKTYAHLFDDKVMKQLKRRRYTGWGRLSRKLINGIRDKQSGKTILDFLKSDGFANRNFMQLIHDDSLTFKEDIQKAQVSGQGDSLHEHIANLAGSPAIKKGILQTVKVVDELVKVMGRHKPENIVIEMARENQTTQKGQKNSRERMKRIEEGIKELGSQILKEHPVENTQLQNEKLYLYYLQNGRDMYVDQELDINRLSDYDVDHIVPQSFLKDDSIDNKVLTRSDKNRGKSDNVPSEEVVKKMKNYWRQLLNAKLITQRKFDNLTKAERGGLSELDKAGFIKRQLVETRQITKHVAQILDSRMNTKYDENDKLIREVKVITLKSKLVSDFRKDFQFYKVREINNYHHAHDAYLNAVVGTALIKKYPKLESEFVYGDYKVYDVRKMIAKSEQEIGKATAKYFFYSTAHAEIMALRQGGLVMQNYRLIDATLYVTFEPCVMCAGAMIHSRIGRVVFGVRNAKTGAAGSLMDVLHYPGMNHRVEITEGILADECAALLCYFFRMPRQVFNAQKKAQSSTDGSSGSETPGTSESATPESSGSEVEFSHEYWMRHALTLAKRARDEREVPVGAVLVLNNRVIGEGWNRAIGLHDPNIMNFFKTEITLANGEIRKRPLIETNGETGEIVWDKGRDFATVRKVLSMPQVNIVKKTEVQTGGFSKESILPKRNSDKLIARKKDWDPKKYGGFDSPTVAYSVLVVAKVEKGKSKKLKSVKELLGITIMERSSFEKNPIDFLEAKGYKEVKKDLIIKLPKYSLFELENGRKRMLASAGELQKGNELALPSKYVNFLYLASHYEKLKGSPEDNEQKQLFVEQHKHYLDEIIEQISEFSKRVILADANLDKVLSAYNKHRDKPIREQAENIIHLFTLTNLGAPAAFKYFDTTIDRKRYTSTKEVLDATLIHQSITGLYETRIDLSQLGGD

SEQ ID NO: 307 - protein, 1554 aa, synthetic construct
  REGION 1..1554: note = 131 TadA CP65ins 1054 polypeptide sequence
MDKKYSIGLAIGTNSVGWAVITDEYKVPSKKFKVLGNTDRHSIKKNLIGALLFDSGETAEATRLKRTARRRYTRRKNRICYLQEIFSNEMAKVDDSFFHRLEESFLVEEDKKHERHPIFGNIVDEVAYHEKYPTIYHLRKKLVDSTDKADLRLIYLALAHMIKFRGHFLIEGDLNPDNSDVDKLFIQLVQTYNQLFEENPINASGVDAKAILSARLSKSRRLENLIAQLPGEKKNGLFGNLIALSLGLTPNFKSNFDLAEDAKLQLSKDTYDDDLDNLLAQIGDQYADLFLAAKNLSDAILLSDILRVNTEITKAPLSASMIKRYDEHHQDLTLLKALVRQQLPEKYKEIFFDQSKNGYAGYIDGGASQEEFYKFIKPILEKMDGTEELLVKLNREDLLRKQRTFDNGSIPHQIHLGELHAILRRQEDFYPFLKDNREKIEKILTFRIPYYVGPLARGNSRFAWMTRKSEETITPWNFEEVVDKGASAQSFIERMTNFDKNLPNEKVLPKHSLLYEYFTVYNELTKVKYVTEGMRKPAFLSGEQKKAIVDLLFKTNRKVTVKQLKEDYFKKIECFDSVEISGVEDRFNASLGTYHDLLKIIKDKDFLDNEENEDILEDIVLTLTLFEDREMIEERLKTYAHLFDDKVMKQLKRRRYTGWGRLSRKLINGIRDKQSGKTILDFLKSDGFANRNFMQLIHDDSLTFKEDIQKAQVSGQGDSLHEHIANLAGSPAIKKGILQTVKVVDELVKVMGRHKPENIVIEMARENQTTQKGQKNSRERMKRIEEGIKELGSQILKEHPVENTQLQNEKLYLYYLQNGRDMYVDQELDINRLSDYDVDHIVPQSFLKDDSIDNKVLTRSDKNRGKSDNVPSEEVVKKMKNYWRQLLNAKLITQRKFDNLTKAERGGLSELDKAGFIKRQLVETRQITKHVAQILDSRMNTKYDENDKLIREVKVITLKSKLVSDFRKDFQFYKVREINNYHHAHDAYLNAVVGTALIKKYPKLESEFVYGDYKVYDVRKMIAKSEQEIGKATAKYFFYSNIMNFFKTEITLANTAHAEIMALRQGGLVMQNYRLIDATLYVTFEPCVMCAGAMIHSRIGRVVFGVRNAKTGAAGSLMDVLHYPGMNHRVEITEGILADECAALLCYFFRMPRQVFNAQKKAQSSTDGSSGSETPGTSESATPESSGSEVEFSHEYWMRHALTLAKRARDEREVPVGAVLVLNNRVIGEGWNRAIGLHDPGEIRKRPLIETNGETGEIVWDKGRDFATVRKVLSMPQVNIVKKTEVQTGGFSKESILPKRNSDKLIARKKDWDPKKYGGFDSPTVAYSVLVVAKVEKGKSKKLKSVKELLGITIMERSSFEKNPIDFLEAKGYKEVKKDLIIKLPKYSLFELENGRKRMLASAGELQKGNELALPSKYVNFLYLASHYEKLKGSPEDNEQKQLFVEQHKHYLDEIIEQISEFSKRVILADANLDKVLSAYNKHRDKPIREQAENIIHLFTLTNLGAPAAFKYFDTTIDRKRYTSTKEVLDATLIHQSITGLYETRIDLSQLGGD

SEQ ID NO: 308 - protein, 1554 aa, synthetic construct
  REGION 1..1554: note = 132 TadA CP65ins 1246 polypeptide sequence
MDKKYSIGLAIGTNSVGWAVITDEYKVPSKKFKVLGNTDRHSIKKNLIGALLFDSGETAEATRLKRTARRRYTRRKNRICYLQEIFSNEMAKVDDSFFHRLEESFLVEEDKKHERHPIFGNIVDEVAYHEKYPTIYHLRKKLVDSTDKADLRLIYLALAHMIKFRGHFLIEGDLNPDNSDVDKLFIQLVQTYNQLFEENPINASGVDAKAILSARLSKSRRLENLIAQLPGEKKNGLFGNLIALSLGLTPNFKSNFDLAEDAKLQLSKDTYDDDLDNLLAQIGDQYADLFLAAKNLSDAILLSDILRVNTEITKAPLSASMIKRYDEHHQDLTLLKALVRQQLPEKYKEIFFDQSKNGYAGYIDGGASQEEFYKFIKPILEKMDGTEELLVKLNREDLLRKQRTFDNGSIPHQIHLGELHAILRRQEDFYPFLKDNREKIEKILTFRIPYYVGPLARGNSRFAWMTRKSEETITPWNFEEVVDKGASAQSFIERMTNFDKNLPNEKVLPKHSLLYEYFTVYNELTKVKYVTEGMRKPAFLSGEQKKAIVDLLFKTNRKVTVKQLKEDYFKKIECFDSVEISGVEDRFNASLGTYHDLLKIIKDKDFLDNEENEDILEDIVLTLTLFEDREMIEERLKTYAHLFDDKVMKQLKRRRYTGWGRLSRKLINGIRDKQSGKTILDFLKSDGFANRNFMQLIHDDSLTFKEDIQKAQVSGQGDSLHEHIANLAGSPAIKKGILQTVKVVDELVKVMGRHKPENIVIEMARENQTTQKGQKNSRERMKRIEEGIKELGSQILKEHPVENTQLQNEKLYLYYLQNGRDMYVDQELDINRLSDYDVDHIVPQSFLKDDSIDNKVLTRSDKNRGKSDNVPSEEVVKKMKNYWRQLLNAKLITQRKFDNLTKAERGGLSELDKAGFIKRQLVETRQITKHVAQILDSRMNTKYDENDKLIREVKVITLKSKLVSDFRKDFQFYKVREINNYHHAHDAYLNAVVGTALIKKYPKLESEFVYGDYKVYDVRKMIAKSEQEIGKATAKYFFYSNIMNFFKTEITLANGEIRKRPLIETNGETGEIVWDKGRDFATVRKVLSMPQVNIVKKTEVQTGGFSKESILPKRNSDKLIARKKDWDPKKYGGFDSPTVAYSVLVVAKVEKGKSKKLKSVKELLGITIMERSSFEKNPIDFLEAKGYKEVKKDLIIKLPKYSLFELENGRKRMLASAGELQKGNELALPSKYVNFLYLASHYEKLKGTAHAEIMALRQGGLVMQNYRLIDATLYVTFEPCVMCAGAMIHSRIGRVVFGVRNAKTGAAGSLMDVLHYPGMNHRVEITEGILADECAALLCYFFRMPRQVFNAQKKAQSSTDGSSGSETPGTSESATPESSGSEVEFSHEYWMRHALTLAKRARDEREVPVGAVLVLNNRVIGEGWNRAIGLHDPSPEDNEQKQLFVEQHKHYLDEIIEQISEFSKRVILADANLDKVLSAYNKHRDKPIREQAENIIHLFTLTNLGAPAAFKYFDTTIDRKRYTSTKEVLDATLIHQSITGLYETRIDLSQLGGD

SEQ ID NO: 309 - protein, 160 aa, Staphylococcus aureus
  REGION 1..160: note = MISC_FEATURE - TadA polypeptide sequence
MGSHMTNDIYFMTLAIEEAKKAAQLGEVPIGAIITKDDEVIARAHNLRETLQQPTAHAEHIAIERAAKVLGSWRLEGCTLYVTLEPCVMCAGTIVMSRIPRVVYGADDPKGGCSGSLMNLLQQSNFNHRAIVDKGVLKEACSTLLTTFFKNLRANKKSTN

SEQ ID NO: 310 - protein, 161 aa, Bacillus subtilis
  REGION 1..161: note = MISC_FEATURE - TadA polypeptide sequence
MTQDELYMKEAIKEAKKAEEKGEVPIGAVLVINGEIIARAHNLRETEQRSIAHAEMLVIDEACKALGTWRLEGATLYVTLEPCPMCAGAVVLSRVEKVVFGAFDPKGGCSGTLMNLLQEERFNHQAEVVSGVLEEECGGMLSAFFRELRKKKKAARKNLSE

SEQ ID NO: 311 - protein, 183 aa, Salmonella enterica
  REGION 1..183: note = MISC_FEATURE - TadA polypeptide sequence
  source 1..183: note = serovar Typhimurium
MPPAFITGVTSLSDVELDHEYWMRHALTLAKRAWDEREVPVGAVLVHNHRVIGEGWNRPIGRHDPTAHAEIMALRQGGLVLQNYRLLDTTLYVTLEPCVMCAGAMVHSRIGRVVFGARDAKTGAAGSLIDVLHHPGMNHRVEIIEGVLRDECATLLSDFFRMRRQEIKALKKADRAEGAGPAV

SEQ ID NO: 312 - protein, 164 aa, Shewanella putrefaciens
  REGION 1..164: note = MISC_FEATURE - TadA polypeptide sequence
MDEYWMQVAMQMAEKAEAAGEVPVGAVLVKDGQQIATGYNLSISQHDPTAHAEILCLRSAGKKLENYRLLDATLYITLEPCAMCAGAMVHSRIARVVYGARDEKTGAAGTVVNLLQHPAFNHQVEVTSGVLAEACSAQLSRFFKRRRDEKKALKLAQRAQQGIE

SEQ ID NO: 313 - protein, 173 aa, Haemophilus influenzae
  REGION 1..173: note = MISC_FEATURE - TadA polypeptide sequence
MDAAKVRSEFDEKMMRYALELADKAEALGEIPVGAVLVDDARNIIGEGWNLSIVQSDPTAHAEIIALRNGAKNIQNYRLLNSTLYVTLEPCTMCAGAILHSRIKRLVFGASDYKTGAIGSRFHFFDDYKMNHTLEITSGVLAEECSQKLSTFFQKRREEKKIEKALLKSLSDK

SEQ ID NO: 314 - protein, 161 aa, Caulobacter crescentus
  REGION 1..161: note = MISC_FEATURE - TadA polypeptide sequence
MRTDESEDQDHRMMRLALDAARAAAEAGETPVGAVILDPSTGEVIATAGNGPIAAHDPTAHAEIAAMRAAAAKLGNYRLTDLTLVVTLEPCAMCAGAISHARIGRVVFGADDPKGGAVVHGPKFFAQPTCHWRPEVTGGVLADESADLLRGFFRARRKAKI

SEQ ID NO: 315 - protein, 179 aa, Geobacter sulfurreducens
  REGION 1..179: note = MISC_FEATURE - TadA polypeptide sequence
MSSLKKTPIRDDAYWMGKAIREAAKAAARDEVPIGAVIVRDGAVIGRGHNLREGSNDPSAHAEMIAIRQAARRSANWRLTGATLYVTLEPCLMCMGAIILARLERVVFGCYDPKGGAAGSLYDLSADPRLNHQVRLSPGVCQEECGTMLSDFFRDLRRRKKAKATPALFIDERKVPPEP

SEQ ID NO: 316 - protein, 167 aa, synthetic construct
  REGION 1..167: note = TadA*8 polypeptide sequence
MSEVEFSHEYWMRHALTLAKRARDEREVPVGAVLVLNNRVIGEGWNRAIGLHDPTAHAEIMALRQGGLVMQNYRLIDATLYVTFEPCVMCAGAMIHSRIGRVVFGVRNAKTGAAGSLMDVLHYPGMNHRVEITEGILADECAALLCTFFRMPRQVFNAQKKAQSSTD

SEQ ID NO: 317 - RNA, 80 nt, synthetic construct
  misc_feature 1..80: note = gRNA scaffold polynucleotide sequence
  source 1..80: mol_type = other RNA
gttttagagctagaaatagcaagttaaaataaggctagtccgttatcaacttgaaaaagtggcaccgagtcggtgctttt

SEQ ID NO: 318 - RNA, 125 nt, synthetic construct
  misc_feature 1..125: note = gRNA scaffold polynucleotide sequence
  source 1..125: mol_type = other RNA
gtttttgtactctcaagatttaagtaactgtacaacgaaacttacacagttacttaaatcttgcagaagctacaaagataaggcttcatgccgaaatcaacaccctgtcattttatggcagggtg

SEQ ID NO: 319 - RNA, 76 nt, Streptococcus pyogenes
  misc_feature 1..76: note = S. pyogenes gRNA scaffold oligonucleotide sequence
  source 1..76: mol_type = other RNA
gttttagagctagaaatagcaagttaaaataaggctagtccgttatcaacttgaaaaagtggcaccgagtcggtgc

SEQ ID NO: 320 - RNA, 84 nt, Staphylococcus aureus
  misc_feature 1..84: note = S. aureus gRNA scaffold oligonucleotide sequence
  source 1..84: mol_type = other RNA
gttttagtactctgtaatgaaaattacagaatctactaaaacaaggcaaaatgccgtgtttatctcgtcaacttgttggcgaga

SEQ ID NO: 321 - RNA, 97 nt, Bacillus hisashii
  misc_feature 1..97: note = BhCas12b gRNA scaffold oligonucleotide sequence
  source 1..97: mol_type = other RNA
gttctgtcttttggtcaggacaaccgtctagctataagtgctgcagggtgtgagaaactcctattgctggacgatgtctcttacgaggcattagcac

SEQ ID NO: 322 - RNA, 88 nt, Bacillus sp.
  misc_feature 1..88: note = BvCas12b gRNA scaffold oligonucleotide sequence
  source 1..88: mol_type = other RNA
gacctatagggtcaatgaatctgtgcgtgtgccataagtaattaaaaattacccaccacaggagcacctgaaaacaggtgcttggcac

SEQ ID NO: 323 - RNA, 80 nt, synthetic construct
  misc_feature 1..80: note = gRNA scaffold nucleotide sequence; oligonucleotide sequence
  modified_base 78..80: mod_base = um
  source 1..80: mol_type = other RNA
  modified_base 78..80: mod_base = OTHER; note = In embodiments, a nucleotide(s) is linked to the preceding 5' nucleotide by a 3' phosphorothioate internucleotide linkage
gttttagagctagaaatagcaagttaaaataaggctagtccgttatcaacttgaaaaagtgggaccgagtcggtgctttt

SEQ ID NO: 324 - RNA, 80 nt, synthetic construct; identical to SEQ ID NO: 317
  misc_feature 1..80: note = gRNA scaffold nucleotide sequence
  modified_base 78..80: mod_base = um
  source 1..80: mol_type = other RNA
  modified_base 78..80: mod_base = OTHER; note = In embodiments, a nucleotide(s) is linked to the preceding 5' nucleotide by a 3' phosphorothioate internucleotide linkage

SEQ ID NO: 325 - RNA, 117 nt, Bacillus hisashii
  misc_feature 1..117: note = BhCas12b gRNA scaffold + guide sequence; oligonucleotide sequence
  misc_feature 1..97: note = BhCas12b sgRNA scaffold
  source 1..117: mol_type = other RNA
gttctgtcttttggtcaggacaaccgtctagctataagtgctgcagggtgtgagaaactcctattgctggacgatgtctcttacgaggcattagcacnnnnnnnnnnnnnnnnnnnn

SEQ ID NO: 326 - RNA, 108 nt, Bacillus sp.
  misc_feature 1..108: note = BvCas12b gRNA scaffold + guide sequence; oligonucleotide sequence
  misc_feature 1..88: note = BvCas12b gRNA scaffold
  source 1..108: mol_type = other RNA
gacctatagggtcaatgaatctgtgcgtgtgccataagtaattaaaaattacccaccacaggagcacctgaaaacaggtgcttggcacnnnnnnnnnnnnnnnnnnnn

SEQ ID NO: 327 - RNA, 119 nt, Alicyclobacillus acidiphilus
  misc_feature 1..119: note = AaCas12b gRNA scaffold + guide sequence; oligonucleotide sequence
  misc_feature 1..99: note = AaCas12b gRNA scaffold
  source 1..119: mol_type = other RNA
gtctaaaggacagaatttttcaacgggtgtgccaatggccactttccaggtggcaaagcccgttgaacttctcaaaaagaacgatctgagaagtggcacnnnnnnnnnnnnnnnnnnnn

SEQ ID NO: 328 - protein, 29 aa, synthetic construct
  REGION 1..29: note = synthetic polypeptide sequence
PKKKRKVEGADKRTADGSEFESPKKKRKV

SEQ ID NO: 329 - protein, 23 aa, synthetic construct
  REGION 1..23: note = synthetic peptide sequence
RKSGKIAAIVVKRPRKPKKKRKV

SEQ ID NO: 330 - protein, 8 aa, synthetic construct
  REGION 1..8: note = synthetic peptide sequence
SGGSSGGS

SEQ ID NO: 331 - protein, 1609 aa, synthetic construct
  REGION 1..1609: note = pNMG-B335ABE8.1_Y147T_CP5_NGC PAM_monomer polypeptide sequence
MSEVEFSHEYWMRHALTLAKRARDEREVPVGAVLVLNNRVIGEGWNRAIGLHDPTAHAEIMALRQGGLVMQNYRLIDATLYVTFEPCVMCAGAMIHSRIGRVVFGVRNAKTGAAGSLMDVLHYPGMNHRVEITEGILADECAALLCTFFRMPRQVFNAQKKAQSSTDSGGSSGGSSGSETPGTSESATPESSGGSSGGSEIGKATAKYFFYSNIMNFFKTEITLANGEIRKRPLIETNGETGEIVWDKGRDFATVRKVLSMPQVNIVKKTEVQTGGFSKESILPKRNSDKLIARKKDWDPKKYGGFMQPTVAYSVLVVAKVEKGKSKKLKSVKELLGITIMERSSFEKNPIDFLEAKGYKEVKKDLIIKLPKYSLFELENGRKRMLASAKFLQKGNELALPSKYVNFLYLASHYEKLKGSPEDNEQKQLFVEQHKHYLDEIIEQISEFSKRVILADANLDKVLSAYNKHRDKPIREQAENIIHLFTLTNLGAPRAFKYFDTTIARKEYRSTKEVLDATLIHQSITGLYETRIDLSQLGGDGGSGGSGGSGGSGGSGGSGGMDKKYSIGLAIGTNSVGWAVITDEYKVPSKKFKVLGNTDRHSIKKNLIGALLFDSGETAEATRLKRTARRRYTRRKNRICYLQEIFSNEMAKVDDSFFHRLEESFLVEEDKKHERHPIFGNIVDEVAYHEKYPTIYHLRKKLVDSTDKADLRLIYLALAHMIKFRGHFLIEGDLNPDNSDVDKLFIQLVQTYNQLFEENPINASGVDAKAILSARLSKSRRLENLIAQLPGEKKNGLFGNLIALSLGLTPNFKSNFDLAEDAKLQLSKDTYDDDLDNLLAQIGDQYADLFLAAKNLSDAILLSDILRVNTEITKAPLSASMIKRYDEHHQDLTLLKALVRQQLPEKYKEIFFDQSKNGYAGYIDGGASQEEFYKFIKPILEKMDGTEELLVKLNREDLLRKQRTFDNGSIPHQIHLGELHAILRRQEDFYPFLKDNREKIEKILTFRIPYYVGPLARGNSRFAWMTRKSEETITPWNFEEVVDKGASAQSFIERMTNFDKNLPNEKVLPKHSLLYEYFTVYNELTKVKYVTEGMRKPAFLSGEQKKAIVDLLFKTNRKVTVKQLKEDYFKKIECFDSVEISGVEDRFNASLGTYHDLLKIIKDKDFLDNEENEDILEDIVLTLTLFEDREMIEERLKTYAHLFDDKVMKQLKRRRYTGWGRLSRKLINGIRDKQSGKTILDFLKSDGFANRNFMQLIHDDSLTFKEDIQKAQVSGQGDSLHEHIANLAGSPAIKKGILQTVKVVDELVKVMGRHKPENIVIEMARENQTTQKGQKNSRERMKRIEEGIKELGSQILKEHPVENTQLQNEKLYLYYLQNGRDMYVDQELDINRLSDYDVDHIVPQSFLKDDSIDNKVLTRSDKNRGKSDNVPSEEVVKKMKNYWRQLLNAKLITQRKFDNLTKAERGGLSELDKAGFIKRQLVETRQITKHVAQILDSRMNTKYDENDKLIREVKVITLKSKLVSDFRKDFQFYKVREINNYHHAHDAYLNAVVGTALIKKYPKLESEFVYGDYKVYDVRKMIAKSEQEGADKRTADGSEFESPKKKRKV

SEQ ID NO: 332 - protein, 1807 aa, synthetic construct
  REGION 1..1807: note = pNMG-357_ABE8.14 with NGC PAMCP5 polypeptide sequence
  REGION 1..174: note = MISC_FEATURE - Adenosine deaminase sequence
  REGION 175..198: note = MISC_FEATURE - Linker sequence
  REGION 199..365: note = MISC_FEATURE - Adenosine deaminase sequence
  REGION 366..397: note = MISC_FEATURE - Linker sequence
  REGION 398..738: note = MISC_FEATURE - Sequence derived from Cas9
  REGION 739..759: note = MISC_FEATURE - Linker sequence
  REGION 760..1785: note = MISC_FEATURE - Sequence derived from Cas9
  REGION 1786..1807: note = MISC_FEATURE - Bipartite nuclear localization sequence
MSEVEFSHEYWMRHALTLAKRAWDEREVPVGAVLVHNNRVIGEGWNRPIGRHDPTAHAEIMALRQGGLVMQNYRLIDATLYVTLEPCVMCAGAMIHSRIGRVVFGARDAKTGAAGSLMDVLHHPGMNHRVEITEGILADECAALLSDFFRMRRQEIKAQKKAQSSTDGGSSGGSSGSETPGTSESATPESSGGSSGGSMSEVEFSHEYWMRHALTLAKRARDEREVPVGAVLVLNNRVIGEGWNRAIGLHDPTAHAEIMALRQGGLVMQNYRLIDATLYVTFEPCVMCAGAMIHSRIGRVVFGVRNAKTGAAGSLMDVLHYPGMNHRVEITEGILADECAALLCTFFRMPRQVFNAQKKAQSSTDSGGSSGGSSGSETPGTSESATPESSGGSSGGSEIGKATAKYFFYSNIMNFFKTEITLANGEIRKRPLIETNGETGEIVWDKGRDFATVRKVLSMPQVNIVKKTEVQTGGFSKESILPKRNSDKLIARKKDWDPKKYGGFMQPTVAYSVLVVAKVEKGKSKKLKSVKELLGITIMERSSFEKNPIDFLEAKGYKEVKKDLIIKLPKYSLFELENGRKRMLASAKFLQKGNELALPSKYVNFLYLASHYEKLKGSPEDNEQKQLFVEQHKHYLDEIIEQISEFSKRVILADANLDKVLSAYNKHRDKPIREQAENIIHLFTLTNLGAPRAFKYFDTTIARKEYRSTKEVLDATLIHQSITGLYETRIDLSQLGGDGGSGGSGGSGGSGGSGGSGGMDKKYSIGLAIGTNSVGWAVITDEYKVPSKKFKVLGNTDRHSIKKNLIGALLFDSGETAEATRLKRTARRRYTRRKNRICYLQEIFSNEMAKVDDSFFHRLEESFLVEEDKKHERHPIFGNIVDEVAYHEKYPTIYHLRKKLVDSTDKADLRLIYLALAHMIKFRGHFLIEGDLNPDNSDVDKLFIQLVQTYNQLFEENPINASGVDAKAILSARLSKSRRLENLIAQLPGEKKNGLFGNLIALSLGLTPNFKSNFDLAEDAKLQLSKDTYDDDLDNLLAQIGDQYADLFLAAKNLSDAILLSDILRVNTEITKAPLSASMIKRYDEHHQDLTLLKALVRQQLPEKYKEIFFDQSKNGYAGYIDGGASQEEFYKFIKPILEKMDGTEELLVKLNREDLLRKQRTFDNGSIPHQIHLGELHAILRRQEDFYPFLKDNREKIEKILTFRIPYYVGPLARGNSRFAWMTRKSEETITPWNFEEVVDKGASAQSFIERMTNFDKNLPNEKVLPKHSLLYEYFTVYNELTKVKYVTEGMRKPAFLSGEQKKAIVDLLFKTNRKVTVKQLKEDYFKKIECFDSVEISGVEDRFNASLGTYHDLLKIIKDKDFLDNEENEDILEDIVLTLTLFEDREMIEERLKTYAHLFDDKVMKQLKRRRYTGWGRLSRKLINGIRDKQSGKTILDFLKSDGFANRNFMQLIHDDSLTFKEDIQKAQVSGQGDSLHEHIANLAGSPAIKKGILQTVKVVDELVKVMGRHKPENIVIEMARENQTTQKGQKNSRERMKRIEEGIKELGSQILKEHPVENTQLQNEKLYLYYLQNGRDMYVDQELDINRLSDYDVDHIVPQSFLKDDSIDNKVLTRSDKNRGKSDNVPSEEVVKKMKNYWRQLLNAKLITQRKFDNLTKAERGGLSELDKAGFIKRQLVETRQITKHVAQILDSRMNTKYDENDKLIREVKVITLKSKLVSDFRKDFQFYKVREINNYHHAHDAYLNAVVGTALIKKYPKLESEFVYGDYKVYDVRKMIAKSEQEGADKRTADGSEFESPKKKRKV

SEQ ID NO: 333 - protein, 1588 aa, synthetic construct
  REGION 1..1588: note = ABE8.8-m polypeptide sequence
  REGION 1..167: note = MISC_FEATURE - Adenosine deaminase sequence
  REGION 168..199: note = MISC_FEATURE - Linker sequence
  REGION 200..1566: note = MISC_FEATURE - Sequence derived from Cas9
  REGION 1567..1588: note = MISC_FEATURE - Bipartite nuclear localization sequence
MSEVEFSHEYWMRHALTLAKRARDEREVPVGAVLVLNNRVIGEGWNRAIGLHDPTAHAEIMALRQGGLVMQNYRLIDATLYVTFEPCVMCAGAMIHSRIGRVVFGVRNAKTGAAGSLMDVLHHPGMNHRVEITEGILADECAALLCRFFRMPRRVFNAQKKAQSSTDSGGSSGGSSGSETPGTSESATPESSGGSSGGSDKKYSIGLAIGTNSVGWAVITDEYKVPSKKFKVLGNTDRHSIKKNLIGALLFDSGETAEATRLKRTARRRYTRRKNRICYLQEIFSNEMAKVDDSFFHRLEESFLVEEDKKHERHPIFGNIVDEVAYHEKYPTIYHLRKKLVDSTDKADLRLIYLALAHMIKFRGHFLIEGDLNPDNSDVDKLFIQLVQTYNQLFEENPINASGVDAKAILSARLSKSRRLENLIAQLPGEKKNGLFGNLIALSLGLTPNFKSNFDLAEDAKLQLSKDTYDDDLDNLLAQIGDQYADLFLAAKNLSDAILLSDILRVNTEITKAPLSASMIKRYDEHHQDLTLLKALVRQQLPEKYKEIFFDQSKNGYAGYIDGGASQEEFYKFIKPILEKMDGTEELLVKLNREDLLRKQRTFDNGSIPHQIHLGELHAILRRQEDFYPFLKDNREKIEKILTFRIPYYVGPLARGNSRFAWMTRKSEETITPWNFEEVVDKGASAQSFIERMTNFDKNLPNEKVLPKHSLLYEYFTVYNELTKVKYVTEGMRKPAFLSGEQKKAIVDLLFKTNRKVTVKQLKEDYFKKIECFDSVEISGVEDRFNASLGTYHDLLKIIKDKDFLDNEENEDILEDIVLTLTLFEDREMIEERLKTYAHLFDDKVMKQLKRRRYTGWGRLSRKLINGIRDKQSGKTILDFLKSDGFANRNFMQLIHDDSLTFKEDIQKAQVSGQGDSLHEHIANLAGSPAIKKGILQTVKVVDELVKVMGRHKPENIVIEMARENQTTQKGQKNSRERMKRIEEGIKELGSQILKEHPVENTQLQNEKLYLYYLQNGRDMYVDQELDINRLSDYDVDHIVPQSFLKDDSIDNKVLTRSDKNRGKSDNVPSEEVVKKMKNYWRQLLNAKLITQRKFDNLTKAERGGLSELDKAGFIKRQLVETRQITKHVAQILDSRMNTKYDENDKLIREVKVITLKSKLVSDFRKDFQFYKVREINNYHHAHDAYLNAVVGTALIKKYPKLESEFVYGDYKVYDVRKMIAKSEQEIGKATAKYFFYSNIMNFFKTEITLANGEIRKRPLIETNGETGEIVWDKGRDFATVRKVLSMPQVNIVKKTEVQTGGFSKESILPKRNSDKLIARKKDWDPKKYGGFDSPTVAYSVLVVAKVEKGKSKKLKSVKELLGITIMERSSFEKNPIDFLEAKGYKEVKKDLIIKLPKYSLFELENGRKRMLASAGELQKGNELALPSKYVNFLYLASHYEKLKGSPEDNEQKQLFVEQHKHYLDEIIEQISEFSKRVILADANLDKVLSAYNKHRDKPIREQAENIIHLFTLTNLGAPAAFKYFDTTIDRKRYTSTKEVLDATLIHQSITGLYETRIDLSQLGGDEGADKRTADGSEFESPKKKRKV

SEQ ID NO: 334 - protein, 1786 aa, synthetic construct
  REGION 1..1786: note = ABE8.8-d polypeptide sequence
  REGION 1..167: note = MISC_FEATURE - Adenosine deaminase sequence
  REGION 168..199: note = MISC_FEATURE - Linker sequence
  REGION 200..365: note = MISC_FEATURE - Adenosine deaminase sequence
  REGION 366..397: note = MISC_FEATURE - Linker sequence
  REGION 398..1764: note = MISC_FEATURE - Sequence derived from Cas9
  REGION 1765..1786: note = MISC_FEATURE - Bipartite nuclear localization sequence
MSEVEFSHEYWMRHALTLAKRAWDEREVPVGAVLVHNNRVIGEGWNRPIGRHDPTAHAEIMALRQGGLVMQNYRLIDATLYVTLEPCVMCAGAMIHSRIGRVVFGARDAKTGAAGSLMDVLHHPGMNHRVEITEGILADECAALLSDFFRMRRQEIKAQKKAQSSTDSGGSSGGSSGSETPGTSESATPESSGGSSGGSSEVEFSHEYWMRHALTLAKRARDEREVPVGAVLVLNNRVIGEGWNRAIGLHDPTAHAEIMALRQGGLVMQNYRLIDATLYVTFEPCVMCAGAMIHSRIGRVVFGVRNAKTGAAGSLMDVLHHPGMNHRVEITEGILADECAALLCRFFRMPRRVFNAQKKAQSSTDSGGSSGGSSGSETPGTSESATPESSGGSSGGSDKKYSIGLAIGTNSVGWAVITDEYKVPSKKFKVLGNTDRHSIKKNLIGALLFDSGETAEATRLKRTARRRYTRRKNRICYLQEIFSNEMAKVDDSFFHRLEESFLVEEDKKHERHPIFGNIVDEVAYHEKYPTIYHLRKKLVDSTDKADLRLIYLALAHMIKFRGHFLIEGDLNPDNSDVDKLFIQLVQTYNQLFEENPINASGVDAKAILSARLSKSRRLENLIAQLPGEKKNGLFGNLIALSLGLTPNFKSNFDLAEDAKLQLSKDTYDDDLDNLLAQIGDQYADLFLAAKNLSDAILLSDILRVNTEITKAPLSASMIKRYDEHHQDLTLLKALVRQQLPEKYKEIFFDQSKNGYAGYIDGGASQEEFYKFIKPILEKMDGTEELLVKLNREDLLRKQRTFDNGSIPHQIHLGELHAILRRQEDFYPFLKDNREKIEKILTFRIPYYVGPLARGNSRFAWMTRKSEETITPWNFEEVVDKGASAQSFIERMTNFDKNLPNEKVLPKHSLLYEYFTVYNELTKVKYVTEGMRKPAFLSGEQKKAIVDLLFKTNRKVTVKQLKEDYFKKIECFDSVEISGVEDRFNASLGTYHDLLKIIKDKDFLDNEENEDILEDIVLTLTLFEDREMIEERLKTYAHLFDDKVMKQLKRRRYTGWGRLSRKLINGIRDKQSGKTILDFLKSDGFANRNFMQLIHDDSLTFKEDIQKAQVSGQGDSLHEHIANLAGSPAIKKGILQTVKVVDELVKVMGRHKPENIVIEMARENQTTQKGQKNSRERMKRIEEGIKELGSQILKEHPVENTQLQNEKLYLYYLQNGRDMYVDQELDINRLSDYDVDHIVPQSFLKDDSIDNKVLTRSDKNRGKSDNVPSEEVVKKMKNYWRQLLNAKLITQRKFDNLTKAERGGLSELDKAGFIKRQLVETRQITKHVAQILDSRMNTKYDENDKLIREVKVITLKSKLVSDFRKDFQFYKVREINNYHHAHDAYLNAVVGTALIKKYPKLESEFVYGDYKVYDVRKMIAKSEQEIGKATAKYFFYSNIMNFFKTEITLANGEIRKRPLIETNGETGEIVWDKGRDFATVRKVLSMPQVNIVKKTEVQTGGFSKESILPKRNSDKLIARKKDWDPKKYGGFDSPTVAYSVLVVAKVEKGKSKKLKSVKELLGITIMERSSFEKNPIDFLEAKGYKEVKKDLIIKLPKYSLFELENGRKRMLASAGELQKGNELALPSKYVNFLYLASHYEKLKGSPEDNEQKQLFVEQHKHYLDEIIEQISEFSKRVILADANLDKVLSAYNKHRDKPIREQAENIIHLFTLTNLGAPAAFKYFDTTIDRKRYTSTKEVLDATLIHQSITGLYETRIDLSQLGGDEGADKRTADGSEFESPKKKRKV

SEQ ID NO: 335 - protein, 1588 aa, synthetic construct
  REGION 1..1588: note = ABE8.13-m polypeptide sequence
  REGION 1..167: note = MISC_FEATURE - Adenosine deaminase sequence
  REGION 168..199: note = MISC_FEATURE - Linker sequence
  REGION 200..1566: note = MISC_FEATURE - Sequence derived from Cas9
  REGION 1567..1588: note = MISC_FEATURE - Bipartite nuclear localization sequence
MSEVEFSHEYWMRHALTLAKRARDEREVPVGAVLVLNNRVIGEGWNRAIGLHDPTAHAEIMALRQGGLVMQNYRLYDATLYVTFEPCVMCAGAMIHSRIGRVVFGVRNAKTGAAGSLMDVLHHPGMNHRVEITEGILADECAALLCRFFRMPRRVFNAQKKAQSSTDSGGSSGGSSGSETPGTSESATPESSGGSSGGSDKKYSIGLAIGTNSVGWAVITDEYKVPSKKFKVLGNTDRHSIKKNLIGALLFDSGETAEATRLKRTARRRYTRRKNRICYLQEIFSNEMAKVDDSFFHRLEESFLVEEDKKHERHPIFGNIVDEVAYHEKYPTIYHLRKKLVDSTDKADLRLIYLALAHMIKFRGHFLIEGDLNPDNSDVDKLFIQLVQTYNQLFEENPINASGVDAKAILSARLSKSRRLENLIAQLPGEKKNGLFGNLIALSLGLTPNFKSNFDLAEDAKLQLSKDTYDDDLDNLLAQIGDQYADLFLAAKNLSDAILLSDILRVNTEITKAPLSASMIKRYDEHHQDLTLLKALVRQQLPEKYKEIFFDQSKNGYAGYIDGGASQEEFYKFIKPILEKMDGTEELLVKLNREDLLRKQRTFDNGSIPHQIHLGELHAILRRQEDFYPFLKDNREKIEKILTFRIPYYVGPLARGNSRFAWMTRKSEETITPWNFEEVVDKGASAQSFIERMTNFDKNLPNEKVLPKHSLLYEYFTVYNELTKVKYVTEGMRKPAFLSGEQKKAIVDLLFKTNRKVTVKQLKEDYFKKIECFDSVEISGVEDRFNASLGTYHDLLKIIKDKDFLDNEENEDILEDIVLTLTLFEDREMIEERLKTYAHLFDDKVMKQLKRRRYTGWGRLSRKLINGIRDKQSGKTILDFLKSDGFANRNFMQLIHDDSLTFKEDIQKAQVSGQGDSLHEHIANLAGSPAIKKGILQTVKVVDELVKVMGRHKPENIVIEMARENQTTQKGQKNSRERMKRIEEGIKELGSQILKEHPVENTQLQNEKLYLYYLQNGRDMYVDQELDINRLSDYDVDHIVPQSFLKDDSIDNKVLTRSDKNRGKSDNVPSEEVVKKMKNYWRQLLNAKLITQRKFDNLTKAERGGLSELDKAGFIKRQLVETRQITKHVAQILDSRMNTKYDENDKLIREVKVITLKSKLVSDFRKDFQFYKVREINNYHHAHDAYLNAVVGTALIKKYPKLESEFVYGDYKVYDVRKMIAKSEQEIGKATAKYFFYSNIMNFFKTEITLANGEIRKRPLIETNGETGEIVWDKGRDFATVRKVLSMPQVNIVKKTEVQTGGFSKESILPKRNSDKLIARKKDWDPKKYGGFDSPTVAYSVLVVAKVEKGKSKKLKSVKELLGITIMERSSFEKNPIDFLEAKGYKEVKKDLIIKLPKYSLFELENGRKRMLASAGELQKGNELALPSKYVNFLYLASHYEKLKGSPEDNEQKQLFVEQHKHYLDEIIEQISEFSKRVILADANLDKVLSAYNKHRDKPIREQAENIIHLFTLTNLGAPAAFKYFDTTIDRKRYTSTKEVLDATLIHQSITGLYETRIDLSQLGGDEGADKRTADGSEFESPKKKRKV

SEQ ID NO: 336 - protein, 1786 aa, synthetic construct
  REGION 1..1786: note = ABE8.13-d polypeptide sequence
  REGION 1..167: note = MISC_FEATURE - Adenosine deaminase sequence
  REGION 168..199: note = MISC_FEATURE - Linker sequence
  REGION 200..365: note = MISC_FEATURE - Adenosine deaminase sequence
  REGION 366..397: note = MISC_FEATURE - Linker sequence
  REGION 398..1764: note = MISC_FEATURE - Sequence derived from Cas9
  REGION 1765..1786: note = MISC_FEATURE - Bipartite nuclear localization sequence
MSEVEFSHEYWMRHALTLAKRAWDEREVPVGAVLVHNNRVIGEGWNRPIGRHDPTAHAEIMALRQGGLVMQNYRLIDATLYVTLEPCVMCAGAMIHSRIGRVVFGARDAKTGAAGSLMDVLHHPGMNHRVEITEGILADECAALLSDFFRMRRQEIKAQKKAQSSTDSGGSSGGSSGSETPGTSESATPESSGGSSGGSSEVEFSHEYWMRHALTLAKRARDEREVPVGAVLVLNNRVIGEGWNRAIGLHDPTAHAEIMALRQGGLVMQNYRLYDATLYVTFEPCVMCAGAMIHSRIGRVVFGVRNAKTGAAGSLMDVLHHPGMNHRVEITEGILADECAALLCRFFRMPRRVFNAQKKAQSSTDSGGSSGGSSGSETPGTSESATPESSGGSSGGSDKKYSIGLAIGTNSVGWAVITDEYKVPSKKFKVLGNTDRHSIKKNLIGALLFDSGETAEATRLKRTARRRYTRRKNRICYLQEIFSNEMAKVDDSFFHRLEESFLVEEDKKHERHPIFGNIVDEVAYHEKYPTIYHLRKKLVDSTDKADLRLIYLALAHMIKFRGHFLIEGDLNPDNSDVDKLFIQLVQTYNQLFEENPINASGVDAKAILSARLSKSRRLENLIAQLPGEKKNGLFGNLIALSLGLTPNFKSNFDLAEDAKLQLSKDTYDDDLDNLLAQIGDQYADLFLAAKNLSDAILLSDILRVNTEITKAPLSASMIKRYDEHHQDLTLLKALVRQQLPEKYKEIFFDQSKNGYAGYIDGGASQEEFYKFIKPILEKMDGTEELLVKLNREDLLRKQRTFDNGSIPHQIHLGELHAILRRQEDFYPFLKDNREKIEKILTFRIPYYVGPLARGNSRFAWMTRKSEETITPWNFEEVVDKGASAQSFIERMTNFDKNLPNEKVLPKHSLLYEYFTVYNELTKVKYVTEGMRKPAFLSGEQKKAIVDLLFKTNRKVTVKQLKEDYFKKIECFDSVEISGVEDRFNASLGTYHDLLKIIKDKDFLDNEENEDILEDIVLTLTLFEDREMIEERLKTYAHLFDDKVMKQLKRRRYTGWGRLSRKLINGIRDKQSGKTILDFLKSDGFANRNFMQLIHDDSLTFKEDIQKAQVSGQGDSLHEHIANLAGSPAIKKGILQTVKVVDELVKVMGRHKPENIVIEMARENQTTQKGQKNSRERMKRIEEGIKELGSQILKEHPVENTQLQNEKLYLYYLQNGRDMYVDQELDINRLSDYDVDHIVPQSFLKDDSIDNKVLTRSDKNRGKSDNVPSEEVVKKMKNYWRQLLNAKLITQRKFDNLTKAERGGLSELDKAGFIKRQLVETRQITKHVAQILDSRMNTKYDENDKLIREVKVITLKSKLVSDFRKDFQFYKVREINNYHHAHDAYLNAVVGTALIKKYPKLESEFVYGDYKVYDVRKMIAKSEQEIGKATAKYFFYSNIMNFFKTEITLANGEIRKRPLIETNGETGEIVWDKGRDFATVRKVLSMPQVNIVKKTEVQTGGFSKESILPKRNSDKLIARKKDWDPKKYGGFDSPTVAYSVLVVAKVEKGKSKKLKSVKELLGITIMERSSFEKNPIDFLEAKGYKEVKKDLIIKLPKYSLFELENGRKRMLASAGELQKGNELALPSKYVNFLYLASHYEKLKGSPEDNEQKQLFVEQHKHYLDEIIEQISEFSKRVILADANLDKVLSAYNKHRDKPIREQAENIIHLFTLTNLGAPAAFKYFDTTIDRKRYTSTKEVLDATLIHQSITGLYETRIDLSQLGGDEGADKRTADGSEFESPKKKRKV

SEQ ID NO: 337 - protein, 1588 aa, synthetic construct
  REGION 1..1588: note = ABE8.17-m polypeptide sequence
  REGION 1..167: note = MISC_FEATURE - Adenosine deaminase sequence
  REGION 168..199: note = MISC_FEATURE - Linker sequence
  REGION 200..1566: note = MISC_FEATURE - Sequence derived from Cas9
  REGION 1567..1588: note = MISC_FEATURE - Bipartite nuclear localization sequence
MSEVEFSHEYWMRHALTLAKRARDEREVPVGAVLVLNNRVIGEGWNRAIGLHDPTAHAEIMALRQGGLVMQNYRLIDATLYSTFEPCVMCAGAMIHSRIGRVVFGVRNAKTGAAGSLMDVLHYPGMNHRVEITEGILADECAALLCYFFRMPRRVFNAQKKAQSSTDSGGSSGGSSGSETPGTSESATPESSGGSSGGSDKKYSIGLAIGTNSVGWAVITDEYKVPSKKFKVLGNTDRHSIKKNLIGALLFDSGETAEATRLKRTARRRYTRRKNRICYLQEIFSNEMAKVDDSFFHRLEESFLVEEDKKHERHPIFGNIVDEVAYHEKYPTIYHLRKKLVDSTDKADLRLIYLALAHMIKFRGHFLIEGDLNPDNSDVDKLFIQLVQTYNQLFEENPINASGVDAKAILSARLSKSRRLENLIAQLPGEKKNGLFGNLIALSLGLTPNFKSNFDLAEDAKLQLSKDTYDDDLDNLLAQIGDQYADLFLAAKNLSDAILLSDILRVNTEITKAPLSASMIKRYDEHHQDLTLLKALVRQQLPEKYKEIFFDQSKNGYAGYIDGGASQEEFYKFIKPILEKMDGTEELLVKLNREDLLRKQRTFDNGSIPHQIHLGELHAILRRQEDFYPFLKDNREKIEKILTFRIPYYVGPLARGNSRFAWMTRKSEETITPWNFEEVVDKGASAQSFIERMTNFDKNLPNEKVLPKHSLLYEYFTVYNELTKVKYVTEGMRKPAFLSGEQKKAIVDLLFKTNRKVTVKQLKEDYFKKIECFDSVEISGVEDRFNASLGTYHDLLKIIKDKDFLDNEENEDILEDIVLTLTLFEDREMIEERLKTYAHLFDDKVMKQLKRRRYTGWGRLSRKLINGIRDKQSGKTILDFLKSDGFANRNFMQLIHDDSLTFKEDIQKAQVSGQGDSLHEHIANLAGSPAIKKGILQTVKVVDELVKVMGRHKPENIVIEMARENQTTQKGQKNSRERMKRIEEGIKELGSQILKEHPVENTQLQNEKLYLYYLQNGRDMYVDQELDINRLSDYDVDHIVPQSFLKDDSIDNKVLTRSDKNRGKSDNVPSEEVVKKMKNYWRQLLNAKLITQRKFDNLTKAERGGLSELDKAGFIKRQLVETRQITKHVAQILDSRMNTKYDENDKLIREVKVITLKSKLVSDFRKDFQFYKVREINNYHHAHDAYLNAVVGTALIKKYPKLESEFVYGDYKVYDVRKMIAKSEQEIGKATAKYFFYSNIMNFFKTEITLANGEIRKRPLIETNGETGEIVWDKGRDFATVRKVLSMPQVNIVKKTEVQTGGFSKESILPKRNSDKLIARKKDWDPKKYGGFDSPTVAYSVLVVAKVEKGKSKKLKSVKELLGITIMERSSFEKNPIDFLEAKGYKEVKKDLIIKLPKYSLFELENGRKRMLASAGELQKGNELALPSKYVNFLYLASHYEKLKGSPEDNEQKQLFVEQHKHYLDEIIEQISEFSKRVILADANLDKVLSAYNKHRDKPIREQAENIIHLFTLTNLGAPAAFKYFDTTIDRKRYTSTKEVLDATLIHQSITGLYETRIDLSQLGGDEGADKRTADGSEFESPKKKRKV

SEQ ID NO: 338 - protein, 1786 aa, synthetic construct
  REGION 1..1786: note = ABE8.17-d polypeptide sequence
  REGION 1..167: note = MISC_FEATURE - Adenosine deaminase sequence
  REGION 168..199: note = MISC_FEATURE - Linker sequence
  REGION 200..365: note = MISC_FEATURE - Adenosine deaminase sequence
  REGION 366..397: note = MISC_FEATURE - Linker sequence
  REGION 398..1764: note = MISC_FEATURE - Sequence derived from Cas9
  REGION 1765..1786: note = MISC_FEATURE - Bipartite nuclear localization sequence
MSEVEFSHEYWMRHALTLAKRAWDEREVPVGAVLVHNNRVIGEGWNRPIGRHDPTAHAEIMALRQGGLVMQNYRLIDATLYVTLEPCVMCAGAMIHSRIGRVVFGARDAKTGAAGSLMDVLHHPGMNHRVEITEGILADECAALLSDFFRMRRQEIKAQKKAQSSTDSGGSSGGSSGSETPGTSESATPESSGGSSGGSSEVEFSHEYWMRHALTLAKRARDEREVPVGAVLVLNNRVIGEGWNRAIGLHDPTAHAEIMALRQGGLVMQNYRLIDATLYSTFEPCVMCAGAMIHSRIGRVVFGVRNAKTGAAGSLMDVLHYPGMNHRVEITEGILADECAALLCYFFRMPRRVFNAQKKAQSSTDSGGSSGGSSGSETPGTSESATPESSGGSSGGSDKKYSIGLAIGTNSVGWAVITDEYKVPSKKFKVLGNTDRHSIKKNLIGALLFDSGETAEATRLKRTARRRYTRRKNRICYLQEIFSNEMAKVDDSFFHRLEESFLVEEDKKHERHPIFGNIVDEVAYHEKYPTIYHLRKKLVDSTDKADLRLIYLALAHMIKFRGHFLIEGDLNPDNSDVDKLFIQLVQTYNQLFEENPINASGVDAKAILSARLSKSRRLENLIAQLPGEKKNGLFGNLIALSLGLTPNFKSNFDLAEDAKLQLSKDTYDDDLDNLLAQIGDQYADLFLAAKNLSDAILLSDILRVNTEITKAPLSASMIKRYDEHHQDLTLLKALVRQQLPEKYKEIFFDQSKNGYAGYIDGGASQEEFYKFIKPILEKMDGTEELLVKLNREDLLRKQRTFDNGSIPHQIHLGELHAILRRQEDFYPFLKDNREKIEKILTFRIPYYVGPLARGNSRFAWMTRKSEETITPWNFEEVVDKGASAQSFIERMTNFDKNLPNEKVLPKHSLLYEYFTVYNELTKVKYVTEGMRKPAFLSGEQKKAIVDLLFKTNRKVTVKQLKEDYFKKIECFDSVEISGVEDRFNASLGTYHDLLKIIKDKDFLDNEENEDILEDIVLTLTLFEDREMIEERLKTYAHLFDDKVMKQLKRRRYTGWGRLSRKLINGIRDKQSGKTILDFLKSDGFANRNFMQLIHDDSLTFKEDIQKAQVSGQGDSLHEHIANLAGSPAIKKGILQTVKVVDELVKVMGRHKPENIVIEMARENQTTQKGQKNSRERMKRIEEGIKELGSQILKEHPVENTQLQNEKLYLYYLQNGRDMYVDQELDINRLSDYDVDHIVPQSFLKDDSIDNKVLTRSDKNRGKSDNVPSEEVVKKMKNYWRQLLNAKLITQRKFDNLTKAERGGLSELDKAGFIKRQLVETRQITKHVAQILDSRMNTKYDENDKLIREVKVITLKSKLVSDFRKDFQFYKVREINNYHHAHDAYLNAVVGTALIKKYPKLESEFVYGDYKVYDVRKMIAKSEQEIGKATAKYFFYSNIMNFFKTEITLANGEIRKRPLIETNGETGEIVWDKGRDFATVRKVLSMPQVNIVKKTEVQTGGFSKESILPKRNSDKLIARKKDWDPKKYGGFDSPTVAYSVLVVAKVEKGKSKKLKSVKELLGITIMERSSFEKNPIDFLEAKGYKEVKKDLIIKLPKYSLFELENGRKRMLASAGELQKGNELALPSKYVNFLYLASHYEKLKGSPEDNEQKQLFVEQHKHYLDEIIEQISEFSKRVILADANLDKVLSAYNKHRDKPIREQAENIIHLFTLTNLGAPAAFKYFDTTIDRKRYTSTKEVLDATLIHQSITGLYETRIDLSQLGGDEGADKRTADGSEFESPKKKRKV

SEQ ID NO: 339 - protein, 1588 aa, synthetic construct
  REGION 1..1588: note = ABE8.20-m polypeptide sequence
  REGION 1..167: note = MISC_FEATURE - Adenosine deaminase sequence
  REGION 168..199: note = MISC_FEATURE - Linker sequence
  REGION 200..1566: note = MISC_FEATURE - Sequence derived from Cas9
  REGION 1567..1588: note = MISC_FEATURE - Bipartite nuclear localization sequence
MSEVEFSHEYWMRHALTLAKRARDEREVPVGAVLVLNNRVIGEGWNRAIGLHDPTAHAEIMALRQGGLVMQNYRLYDATLYSTFEPCVMCAGAMIHSRIGRVVFGVRNAKTGAAGSLMDVLHHPGMNHRVEITEGILADECAALLCRFFRMPRRVFNAQKKAQSSTDSGGSSGGSSGSETPGTSESATPESSGGSSGGSDKKYSIGLAIGTNSVGWAVITDEYKVPSKKFKVLGNTDRHSIKKNLIGALLFDSGETAEATRLKRTARRRYTRRKNRICYLQEIFSNEMAKVDDSFFHRLEESFLVEEDKKHERHPIFGNIVDEVAYHEKYPTIYHLRKKLVDSTDKADLRLIYLALAHMIKFRGHFLIEGDLNPDNSDVDKLFIQLVQTYNQLFEENPINASGVDAKAILSARLSKSRRLENLIAQLPGEKKNGLFGNLIALSLGLTPNFKSNFDLAEDAKLQLSKDTYDDDLDNLLAQIGDQYADLFLAAKNLSDAILLSDILRVNTEITKAPLSASMIKRYDEHHQDLTLLKALVRQQLPEKYKEIFFDQSKNGYAGYIDGGASQEEFYKFIKPILEKMDGTEELLVKLNREDLLRKQRTFDNGSIPHQIHLGELHAILRRQEDFYPFLKDNREKIEKILTFRIPYYVGPLARGNSRFAWMTRKSEETITPWNFEEVVDKGASAQSFIERMTNFDKNLPNEKVLPKHSLLYEYFTVYNELTKVKYVTEGMRKPAFLSGEQKKAIVDLLFKTNRKVTVKQLKEDYFKKIECFDSVEISGVEDRFNASLGTYHDLLKIIKDKDFLDNEENEDILEDIVLTLTLFEDREMIEERLKTYAHLFDDKVMKQLKRRRYTGWGRLSRKLINGIRDKQSGKTILDFLKSDGFANRNFMQLIHDDSLTFKEDIQKAQVSGQGDSLHEHIANLAGSPAIKKGILQTVKVVDELVKVMGRHKPENIVIEMARENQTTQKGQKNSRERMKRIEEGIKELGSQILKEHPVENTQLQNEKLYLYYLQNGRDMYVDQELDINRLSDYDVDHIVPQSFLKDDSIDNKVLTRSDKNRGKSDNVPSEEVVKKMKNYWRQLLNAKLITQRKFDNLTKAERGGLSELDKAGFIKRQLVETRQITKHVAQILDSRMNTKYDENDKLIREVKVITLKSKLVSDFRKDFQFYKVREINNYHHAHDAYLNAVVGTALIKKYPKLESEFVYGDYKVYDVRKMIAKSEQEIGKATAKYFFYSNIMNFFKTEITLANGEIRKRPLIETNGETGEIVWDKGRDFATVRKVLSMPQVNIVKKTEVQTGGFSKESILPKRNSDKLIARKKDWDPKKYGGFDSPTVAYSVLVVAKVEKGKSKKLKSVKELLGITIMERSSFEKNPIDFLEAKGYKEVKKDLIIKLPKYSLFELENGRKRMLASAGELQKGNELALPSKYVNFLYLASHYEKLKGSPEDNEQKQLFVEQHKHYLDEIIEQISEFSKRVILADANLDKVLSAYNKHRDKPIREQAENIIHLFTLTNLGAPAAFKYFDTTIDRKRYTSTKEVLDATLIHQSITGLYETRIDLSQLGGDEGADKRTADGSEFESPKKKRKV

SEQ ID NO: 340 - protein, 1786 aa, synthetic construct
  REGION 1..1786: note = ABE8.20-d polypeptide sequence
  REGION 1..167: note = MISC_FEATURE - Adenosine deaminase sequence
  REGION 168..199: note = MISC_FEATURE - Linker sequence
  REGION 200..365: note = MISC_FEATURE - Adenosine deaminase sequence
  REGION 366..397: note = MISC_FEATURE - Linker sequence
  REGION 398..1764: note = MISC_FEATURE - Sequence derived from Cas9
  REGION 1765..1786: note = MISC_FEATURE - Bipartite nuclear localization sequence
MSEVEFSHEYWMRHALTLAKRAWDEREVPVGAVLVHNNRVIGEGWNRPIGRHDPTAHAEIMALRQGGLVMQNYRLIDATLYVTLEPCVMCAGAMIHSRIGRVVFGARDAKTGAAGSLMDVLHHPGMNHRVEITEGILADECAALLSDFFRMRRQEIKAQKKAQSSTDSGGSSGGSSGSETPGTSESATPESSGGSSGGSSEVEFSHEYWMRHALTLAKRARDEREVPVGAVLVLNNRVIGEGWNRAIGLHDPTAHAEIMALRQGGLVMQNYRLYDATLYSTFEPCVMCAGAMIHSRIGRVVFGVRNAKTGAAGSLMDVLHHPGMNHRVEITEGILADECAALLCRFFRMPRRVFNAQKKAQSSTDSGGSSGGSSGSETPGTSESATPESSGGSSGGSDKKYSIGLAIGTNSVGWAVITDEYKVPSKKFKVLGNTDRHSIKKNLIGALLFDSGETAEATRLKRTARRRYTRRKNRICYLQEIFSNEMAKVDDSFFHRLEESFLVEEDKKHERHPIFGNIVDEVAYHEKYPTIYHLRKKLVDSTDKADLRLIYLALAHMIKFRGHFLIEGDLNPDNSDVDKLFIQLVQTYNQLFEENPINASGVDAKAILSARLSKSRRLENLIAQLPGEKKNGLFGNLIALSLGLTPNFKSNFDLAEDAKLQLSKDTYDDDLDNLLAQIGDQYADLFLAAKNLSDAILLSDILRVNTEITKAPLSASMIKRYDEHHQDLTLLKALVRQQLPEKYKEIFFDQSKNGYAGYIDGGASQEEFYKFIKPILEKMDGTEELLVKLNREDLLRKQRTFDNGSIPHQIHLGELHAILRRQEDFYPFLKDNREKIEKILTFRIPYYVGPLARGNSRFAWMTRKSEETITPWNFEEVVDKGASAQSFIERMTNFDKNLPNEKVLPKHSLLYEYFTVYNELTKVKYVTEGMRKPAFLSGEQKKAIVDLLFKTNRKVTVKQLKEDYFKKIECFDSVEISGVEDRFNASLGTYHDLLKIIKDKDFLDNEENEDILEDIVLTLTLFEDREMIEERLKTYAHLFDDKVMKQLKRRRYTGWGRLSRKLINGIRDKQSGKTILDFLKSDGFANRNFMQLIHDDSLTFKEDIQKAQVSGQGDSLHEHIANLAGSPAIKKGILQTVKVVDELVKVMGRHKPENIVIEMARENQTTQKGQKNSRERMKRIEEGIKELGSQILKEHPVENTQLQNEKLYLYYLQNGRDMYVDQELDINRLSDYDVDHIVPQSFLKDDSIDNKVLTRSDKNRGKSDNVPSEEVVKKMKNYWRQLLNAKLITQRKFDNLTKAERGGLSELDKAGFIKRQLVETRQITKHVAQILDSRMNTKYDENDKLIREVKVITLKSKLVSDFRKDFQFYKVREINNYHHAHDAYLNAVVGTALIKKYPKLESEFVYGDYKVYDVRKMIAKSEQEIGKATAKYFFYSNIMNFFKTEITLANGEIRKRPLIETNGETGEIVWDKGRDFATVRKVLSMPQVNIVKKTEVQTGGFSKESILPKRNSDKLIARKKDWDPKKYGGFDSPTVAYSVLVVAKVEKGKSKKLKSVKELLGITIMERSSFEKNPIDFLEAKGYKEVKKDLIIKLPKYSLFELENGRKRMLASAGELQKGNELALPSKYVNFLYLASHYEKLKGSPEDNEQKQLFVEQHKHYLDEIIEQISEFSKRVILADANLDKVLSAYNKHRDKPIREQAENIIHLFTLTNLGAPAAFKYFDTTIDRKRYTSTKEVLDATLIHQSITGLYETRIDLSQLGGDEGADKRTADGSEFESPKKKRKV

SEQ ID NO: 341 - protein, 1588 aa, synthetic construct
  REGION 1..1588: note = 01. monoABE8.1_bpNLS + Y147T polypeptide sequence
MSEVEFSHEYWMRHALTLAKRARDEREVPVGAVLVLNNRVIGEGWNRAIGLHDPTAHAEIMALRQGGLVMQNYRLIDATLYVTFEPCVMCAGAMIHSRIGRVVFGVRNAKTGAAGSLMDVLHYPGMNHRVEITEGILADECAALLCTFFRMPRQVFNAQKKAQSSTDSGGSSGGSSGSETPGTSESATPESSGGSSGGSDKKYSIGLAIGTNSVGWAVITDEYKVPSKKFKVLGNTDRHSIKKNLIGALLFDSGETAEATRLKRTARRRYTRRKNRICYLQEIFSNEMAKVDDSFFHRLEESFLVEEDKKHERHPIFGNIVDEVAYHEKYPTIYHLRKKLVDSTDKADLRLIYLALAHMIKFRGHFLIEGDLNPDNSDVDKLFIQLVQTYNQLFEENPINASGVDAKAILSARLSKSRRLENLIAQLPGEKKNGLFGNLIALSLGLTPNFKSNFDLAEDAKLQLSKDTYDDDLDNLLAQIGDQYADLFLAAKNLSDAILLSDILRVNTEITKAPLSASMIKRYDEHHQDLTLLKALVRQQLPEKYKEIFFDQSKNGYAGYIDGGASQEEFYKFIKPILEKMDGTEELLVKLNREDLLRKQRTFDNGSIPHQIHLGELHAILRRQEDFYPFLKDNREKIEKILTFRIPYYVGPLARGNSRFAWMTRKSEETITPWNFEEVVDKGASAQSFIERMTNFDKNLPNEKVLPKHSLLYEYFTVYNELTKVKYVTEGMRKPAFLSGEQKKAIVDLLFKTNRKVTVKQLKEDYFKKIECFDSVEISGVEDRFNASLGTYHDLLKIIKDKDFLDNEENEDILEDIVLTLTLFEDREMIEERLKTYAHLFDDKVMKQLKRRRYTGWGRLSRKLINGIRDKQSGKTILDFLKSDGFANRNFMQLIHDDSLTFKEDIQKAQVSGQGDSLHEHIANLAGSPAIKKGILQTVKVVDELVKVMGRHKPENIVIEMARENQTTQKGQKNSRERMKRIEEGIKELGSQILKEHPVENTQLQNEKLYLYYLQNGRDMYVDQELDINRLSDYDVDHIVPQSFLKDDSIDNKVLTRSDKNRGKSDNVPSEEVVKKMKNYWRQLLNAKLITQRKFDNLTKAERGGLSELDKAGFIKRQLVETRQITKHVAQILDSRMNTKYDENDKLIREVKVITLKSKLVSDFRKDFQFYKVREINNYHHAHDAYLNAVVGTALIKKYPKLESEFVYGDYKVYDVRKMIAKSEQEIGKATAKYFFYSNIMNFFKTEITLANGEIRKRPLIETNGETGEIVWDKGRDFATVRKVLSMPQVNIVKKTEVQTGGFSKESILPKRNSDKLIARKKDWDPKKYGGFVSPTVAYSVLVVAKVEKGKSKKLKSVKELLGITIMERSSFEKNPIDFLEAKGYKEVKKDLIIKLPKYSLFELENGRKRMLASARELQKGNELALPSKYVNFLYLASHYEKLKGSPEDNEQKQLFVEQHKHYLDEIIEQISEFSKRVILADANLDKVLSAYNKHRDKPIREQAENIIHLFTLTNLGAPAAFKYFDTTIDRKQYRSTKEVLDATLIHQSITGLYETRIDLSQLGGDEGADKRTADGSEFESPKKKRKV

SEQ ID NO: 342 - protein, 1588 aa, synthetic construct
  REGION 1..1588: note = 02. monoABE8.1_bpNLS + Y147R polypeptide sequence
MSEVEFSHEYWMRHALTLAKRARDEREVPVGAVLVLNNRVIGEGWNRAIGLHDPTAHAEIMALRQGGLVMQNYRLIDATLYVTFEPCVMCAGAMIHSRIGRVVFGVRNAKTGAAGSLMDVLHYPGMNHRVEITEGILADECAALLCRFFRMPRQVFNAQKKAQSSTDSGGSSGGSSGSETPGTSESATPESSGGSSGGSDKKYSIGLAIGTNSVGWAVITDEYKVPSKKFKVLGNTDRHSIKKNLIGALLFDSGETAEATRLKRTARRRYTRRKNRICYLQEIFSNEMAKVDDSFFHRLEESFLVEEDKKHERHPIFGNIVDEVAYHEKYPTIYHLRKKLVDSTDKADLRLIYLALAHMIKFRGHFLIEGDLNPDNSDVDKLFIQLVQTYNQLFEENPINASGVDAKAILSARLSKSRRLENLIAQLPGEKKNGLFGNLIALSLGLTPNFKSNFDLAEDAKLQLSKDTYDDDLDNLLAQIGDQYADLFLAAKNLSDAILLSDILRVNTEITKAPLSASMIKRYDEHHQDLTLLKALVRQQLPEKYKEIFFDQSKNGYAGYIDGGASQEEFYKFIKPILEKMDGTEELLVKLNREDLLRKQRTFDNGSIPHQIHLGELHAILRRQEDFYPFLKDNREKIEKILTFRIPYYVGPLARGNSRFAWMTRKSEETITPWNFEEVVDKGASAQSFIERMTNFDKNLPNEKVLPKHSLLYEYFTVYNELTKVKYVTEGMRKPAFLSGEQKKAIVDLLFKTNRKVTVKQLKEDYFKKIECFDSVEISGVEDRFNASLGTYHDLLKIIKDKDFLDNEENEDILEDIVLTLTLFEDREMIEERLKTYAHLFDDKVMKQLKRRRYTGWGRLSRKLINGIRDKQSGKTILDFLKSDGFANRNFMQLIHDDSLTFKEDIQKAQVSGQGDSLHEHIANLAGSPAIKKGILQTVKVVDELVKVMGRHKPENIVIEMARENQTTQKGQKNSRERMKRIEEGIKELGSQILKEHPVENTQLQNEKLYLYYLQNGRDMYVDQELDINRLSDYDVDHIVPQSFLKDDSIDNKVLTRSDKNRGKSDNVPSEEVVKKMKNYWRQLLNAKLITQRKFDNLTKAERGGLSELDKAGFIKRQLVETRQITKHVAQILDSRMNTKYDENDKLIREVKVITLKSKLVSDFRKDFQFYKVREINNYHHAHDAYLNAVVGTALIKKYPKLESEFVYGDYKVYDVRKMIAKSEQEIGKATAKYFFYSNIMNFFKTEITLANGEIRKRPLIETNGETGEIVWDKGRDFATVRKVLSMPQVNIVKKTEVQTGGFSKESILPKRNSDKLIARKKDWDPKKYGGFVSPTVAYSVLVVAKVEKGKSKKLKSVKELLGITIMERSSFEKNPIDFLEAKGYKEVKKDLIIKLPKYSLFELENGRKRMLASARELQKGNELALPSKYVNFLYLASHYEKLKGSPEDNEQKQLFVEQHKHYLDEIIEQISEFSKRVILADANLDKVLSAYNKHRDKPIREQAENIIHLFTLTNLGAPAAFKYFDTTIDRKQYRSTKEVLDATLIHQSITGLYETRIDLSQLGGDEGADKRTADGSEFESPKKKRKV

SEQ ID NO: 343 - protein, 1588 aa, synthetic construct
  REGION 1..1588: note = 03. monoABE8.1_bpNLS + Q154S polypeptide sequence
MSEVEFSHEYWMRHALTLAKRARDEREVPVGAVLVLNNRVIGEGWNRAIGLHDPTAHAEIMALRQGGLVMQNYRLIDATLYVTFEPCVMCAGAMIHSRIGRVVFGVRNAKTGAAGSLMDVLHYPGMNHRVEITEGILADECAALLCYFFRMPRSVFNAQKKAQSSTDSGGSSGGSSGSETPGTSESATPESSGGSSGGSDKKYSIGLAIGTNSVGWAVITDEYKVPSKKFKVLGNTDRHSIKKNLIGALLFDSGETAEATRLKRTARRRYTRRKNRICYLQEIFSNEMAKVDDSFFHRLEESFLVEEDKKHERHPIFGNIVDEVAYHEKYPTIYHLRKKLVDSTDKADLRLIYLALAHMIKFRGHFLIEGDLNPDNSDVDKLFIQLVQTYNQLFEENPINASGVDAKAILSARLSKSRRLENLIAQLPGEKKNGLFGNLIALSLGLTPNFKSNFDLAEDAKLQLSKDTYDDDLDNLLAQIGDQYADLFLAAKNLSDAILLSDILRVNTEITKAPLSASMIKRYDEHHQDLTLLKALVRQQLPEKYKEIFFDQSKNGYAGYIDGGASQEEFYKFIKPILEKMDGTEELLVKLNREDLLRKQRTFDNGSIPHQIHLGELHAILRRQEDFYPFLKDNREKIEKILTFRIPYYVGPLARGNSRFAWMTRKSEETITPWNFEEVVDKGASAQSFIERMTNFDKNLPNEKVLPKHSLLYEYFTVYNELTKVKYVTEGMRKPAFLSGEQKKAIVDLLFKTNRKVTVKQLKEDYFKKIECFDSVEISGVEDRFNASLGTYHDLLKIIKDKDFLDNEENEDILEDIVLTLTLFEDREMIEERLKTYAHLFDDKVMKQLKRRRYTGWGRLSRKLINGIRDKQSGKTILDFLKSDGFANRNFMQLIHDDSLTFKEDIQKAQVSGQGDSLHEHIANLAGSPAIKKGILQTVKVVDELVKVMGRHKPENIVIEMARENQTTQKGQKNSRERMKRIEEGIKELGSQILKEHPVENTQLQNEKLYLYYLQNGRDMYVDQELDINRLSDYDVDHIVPQSFLKDDSIDNKVLTRSDKNRGKSDNVPSEEVVKKMKNYWRQLLNAKLITQRKFDNLTKAERGGLSELDKAGFIKRQLVETRQITKHVAQILDSRMNTKYDENDKLIREVKVITLKSKLVSDFRKDFQFYKVREINNYHHAHDAYLNAVVGTALIKKYPKLESEFVYGDYKVYDVRKMIAKSEQEIGKATAKYFFYSNIMNFFKTEITLANGEIRKRPLIETNGETGEIVWDKGRDFATVRKVLSMPQVNIVKKTEVQTGGFSKESILPKRNSDKLIARKKDWDPKKYGGFVSPTVAYSVLVVAKVEKGKSKKLKSVKELLGITIMERSSFEKNPIDFLEAKGYKEVKKDLIIKLPKYSLFELENGRKRMLASARELQKGNELALPSKYVNFLYLASHYEKLKGSPEDNEQKQLFVEQHKHYLDEIIEQISEFSKRVILADANLDKVLSAYNKHRDKPIREQAENIIHLFTLTNLGAPAAFKYFDTTIDRKQYRSTKEVLDATLIHQSITGLYETRIDLSQLGGDEGADKRTADGSEFESPKKKRKV

SEQ ID NO: 344 - protein, 1588 aa, synthetic construct
  REGION 1..1588: note = 04. monoABE8.1_bpNLS + Y123H polypeptide sequence
MSEVEFSHEYWMRHALTLAKRARDEREVPVGAVLVLNNRVIGEGWNRAIGLHDPTAHAEIMALRQGGLVMQNYRLIDATLYVTFEPCVMCAGAMIHSRIGRVVFGVRNAKTGAAGSLMDVLHHPGMNHRVEITEGILADECAALLCYFFRMPRQVFNAQKKAQSSTDSGGSSGGSSGSETPGTSESATPESSGGSSGGSDKKYSIGLAIGTNSVGWAVITDEYKVPSKKFKVLGNTDRHSIKKNLIGALLFDSGETAEATRLKRTARRRYTRRKNRICYLQEIFSNEMAKVDDSFFHRLEESFLVEEDKKHERHPIFGNIVDEVAYHEKYPTIYHLRKKLVDSTDKADLRLIYLALAHMIKFRGHFLIEGDLNPDNSDVDKLFIQLVQTYNQLFEENPINASGVDAKAILSARLSKSRRLENLIAQLPGEKKNGLFGNLIALSLGLTPNFKSNFDLAEDAKLQLSKDTYDDDLDNLLAQIGDQYADLFLAAKNLSDAILLSDILRVNTEITKAPLSASMIKRYDEHHQDLTLLKALVRQQLPEKYKEIFFDQSKNGYAGYIDGGASQEEFYKFIKPILEKMDGTEELLVKLNREDLLRKQRTFDNGSIPHQIHLGELHAILRRQEDFYPFLKDNREKIEKILTFRIPYYVGPLARGNSRFAWMTRKSEETITPWNFEEVVDKGASAQSFIERMTNFDKNLPNEKVLPKHSLLYEYFTVYNELTKVKYVTEGMRKPAFLSGEQKKAIVDLLFKTNRKVTVKQLKEDYFKKIECFDSVEISGVEDRFNASLGTYHDLLKIIKDKDFLDNEENEDILEDIVLTLTLFEDREMIEERLKTYAHLFDDKVMKQLKRRRYTGWGRLSRKLINGIRDKQSGKTILDFLKSDGFANRNFMQLIHDDSLTFKEDIQKAQVSGQGDSLHEHIANLAGSPAIKKGILQTVKVVDELVKVMGRHKPENIVIEMARENQTTQKGQKNSRERMKRIEEGIKELGSQILKEHPVENTQLQNEKLYLYYLQNGRDMYVDQELDINRLSDYDVDHIVPQSFLKDDSIDNKVLTRSDKNRGKSDNVPSEEVVKKMKNYWRQLLNAKLITQRKFDNLTKAERGGLSELDKAGFIKRQLVETRQITKHVAQILDSRMNTKYDENDKLIREVKVITLKSKLVSDFRKDFQFYKVREINNYHHAHDAYLNAVVGTALIKKYPKLESEFVYGDYKVYDVRKMIAKSEQEIGKATAKYFFYSNIMNFFKTEITLANGEIRKRPLIETNGETGEIVWDKGRDFATVRKVLSMPQVNIVKKTEVQTGGFSKESILPKRNSDKLIARKKDWDPKKYGGFVSPTVAYSVLVVAKVEKGKSKKLKSVKELLGITIMERSSFEKNPIDFLEAKGYKEVKKDLIIKLPKYSLFELENGRKRMLASARELQKGNELALPSKYVNFLYLASHYEKLKGSPEDNEQKQLFVEQHKHYLDEIIEQISEFSKRVILADANLDKVLSAYNKHRDKPIREQAENIIHLFTLTNLGAPAAFKYFDTTIDRKQYRSTKEVLDATLIHQSITGLYETRIDLSQLGGDEGADKRTADGSEFESPKKKRKV

SEQ ID NO: 345 - protein, 1588 aa, synthetic construct
  REGION 1..1588: note = 05. monoABE8.1_bpNLS + V82S polypeptide sequence
MSEVEFSHEYWMRHALTLAKRARDEREVPVGAVLVLNNRVIGEGWNRAIGLHDPTAHAEIMALRQGGLVMQNYRLIDATLYSTFEPCVMCAGAMIHSRIGRVVFGVRNAKTGAAGSLMDVLHYPGMNHRVEITEGILADECAALLCYFFRMPRQVFNAQKKAQSSTDSGGSSGGSSGSETPGTSESATPESSGGSSGGSDKKYSIGLAIGTNSVGWAVITDEYKVPSKKFKVLGNTDRHSIKKNLIGALLFDSGETAEATRLKRTARRRYTRRKNRICYLQEIFSNEMAKVDDSFFHRLEESFLVEEDKKHERHPIFGNIVDEVAYHEKYPTIYHLRKKLVDSTDKADLRLIYLALAHMIKFRGHFLIEGDLNPDNSDVDKLFIQLVQTYNQLFEENPINASGVDAKAILSARLSKSRRLENLIAQLPGEKKNGLFGNLIALSLGLTPNFKSNFDLAEDAKLQLSKDTYDDDLDNLLAQIGDQYADLFLAAKNLSDAILLSDILRVNTEITKAPLSASMIKRYDEHHQDLTLLKALVRQQLPEKYKEIFFDQSKNGYAGYIDGGASQEEFYKFIKPILEKMDGTEELLVKLNREDLLRKQRTFDNGSIPHQIHLGELHAILRRQEDFYPFLKDNREKIEKILTFRIPYYVGPLARGNSRFAWMTRKSEETITPWNFEEVVDKGASAQSFIERMTNFDKNLPNEKVLPKHSLLYEYFTVYNELTKVKYVTEGMRKPAFLSGEQKKAIVDLLFKTNRKVTVKQLKEDYFKKIECFDSVEISGVEDRFNASLGTYHDLLKIIKDKDFLDNEENEDILEDIVLTLTLFEDREMIEERLKTYAHLFDDKVMKQLKRRRYTGWGRLSRKLINGIRDKQSGKTILDFLKSDGFANRNFMQLIHDDSLTFKEDIQKAQVSGQGDSLHEHIANLAGSPAIKKGILQTVKVVDELVKVMGRHKPENIVIEMARENQTTQKGQKNSRERMKRIEEGIKELGSQILKEHPVENTQLQNEKLYLYYLQNGRDMYVDQELDINRLSDYDVDHIVPQSFLKDDSIDNKVLTRSDKNRGKSDNVPSEEVVKKMKNYWRQLLNAKLITQRKFDNLTKAERGGLSELDKAGFIKRQLVETRQITKHVAQILDSRMNTKYDENDKLIREVKVITLKSKLVSDFRKDFQFYKVREINNYHHAHDAYLNAVVGTALIKKYPKLESEFVYGDYKVYDVRKMIAKSEQEIGKATAKYFFYSNIMNFFKTEITLANGEIRKRPLIETNGETGEIVWDKGRDFATVRKVLSMPQVNIVKKTEVQTGGFSKESILPKRNSDKLIARKKDWDPKKYGGFVSPTVAYSVLVVAKVEKGKSKKLKSVKELLGITIMERSSFEKNPIDFLEAKGYKEVKKDLIIKLPKYSLFELENGRKRMLASARELQKGNELALPSKYVNFLYLASHYEKLKGSPEDNEQKQLFVEQHKHYLDEIIEQISEFSKRVILADANLDKVLSAYNKHRDKPIREQAENIIHLFTLTNLGAPAAFKYFDTTIDRKQYRSTKEVLDATLIHQSITGLYETRIDLSQLGGDEGADKRTADGSEFESPKKKRKV

SEQ ID NO: 346 - protein, 1588 aa, synthetic construct
  REGION 1..1588: note = 06. monoABE8.1_bpNLS + T166R polypeptide sequence
MSEVEFSHEYWMRHALTLAKRARDEREVPVGAVLVLNNRVIGEGWNRAIGLHDPTAHAEIMALRQGGLVMQNYRLIDATLYVTFEPCVMCAGAMIHSRIGRVVFGVRNAKTGAAGSLMDVLHYPGMNHRVEITEGILADECAALLCYFFRMPRQVFNAQKKAQSSRDSGGSSGGSSGSETPGTSESATPESSGGSSGGSDKKYSIGLAIGTNSVGWAVITDEYKVPSKKFKVLGNTDRHSIKKNLIGALLFDSGETAEATRLKRTARRRYTRRKNRICYLQEIFSNEMAKVDDSFFHRLEESFLVEEDKKHERHPIFGNIVDEVAYHEKYPTIYHLRKKLVDSTDKADLRLIYLALAHMIKFRGHFLIEGDLNPDNSDVDKLFIQLVQTYNQLFEENPINASGVDAKAILSARLSKSRRLENLIAQLPGEKKNGLFGNLIALSLGLTPNFKSNFDLAEDAKLQLSKDTYDDDLDNLLAQIGDQYADLFLAAKNLSDAILLSDILRVNTEITKAPLSASMIKRYDEHHQDLTLLKALVRQQLPEKYKEIFFDQSKNGYAGYIDGGASQEEFYKFIKPILEKMDGTEELLVKLNREDLLRKQRTFDNGSIPHQIHLGELHAILRRQEDFYPFLKDNREKIEKILTFRIPYYVGPLARGNSRFAWMTRKSEETITPWNFEEVVDKGASAQSFIERMTNFDKNLPNEKVLPKHSLLYEYFTVYNELTKVKYVTEGMRKPAFLSGEQKKAIVDLLFKTNRKVTVKQLKEDYFKKIECFDSVEISGVEDRFNASLGTYHDLLKIIKDKDFLDNEENEDILEDIVLTLTLFEDREMIEERLKTYAHLFDDKVMKQLKRRRYTGWGRLSRKLINGIRDKQSGKTILDFLKSDGFANRNFMQLIHDDSLTFKEDIQKAQVSGQGDSLHEHIANLAGSPAIKKGILQTVKVVDELVKVMGRHKPENIVIEMARENQTTQKGQKNSRERMKRIEEGIKELGSQILKEHPVENTQLQNEKLYLYYLQNGRDMYVDQELDINRLSDYDVDHIVPQSFLKDDSIDNKVLTRSDKNRGKSDNVPSEEVVKKMKNYWRQLLNAKLITQRKFDNLTKAERGGLSELDKAGFIKRQLVETRQITKHVAQILDSRMNTKYDENDKLIREVKVITLKSKLVSDFRKDFQFYKVREINNYHHAHDAYLNAVVGTALIKKYPKLESEFVYGDYKVYDVRKMIAKSEQEIGKATAKYFFYSNIMNFFKTEITLANGEIRKRPLIETNGETGEIVWDKGRDFATVRKVLSMPQVNIVKKTEVQTGGFSKESILPKRNSDKLIARKKDWDPKKYGGFVSPTVAYSVLVVAKVEKGKSKKLKSVKELLGITIMERSSFEKNPIDFLEAKGYKEVKKDLIIKLPKYSLFELENGRKRMLASARELQKGNELALPSKYVNFLYLASHYEKLKGSPEDNEQKQLFVEQHKHYLDEIIEQISEFSKRVILADANLDKVLSAYNKHRDKPIREQAENIIHLFTLTNLGAPAAFKYFDTTIDRKQYRSTKEVLDATLIHQSITGLYETRIDLSQLGGDEGADKRTADGSEFESPKKKRKV

SEQ ID NO: 347 - protein, 1588 aa, synthetic construct
  REGION 1..1588: note = 07. monoABE8.1_bpNLS + Q154R polypeptide sequence
MSEVEFSHEYWMRHALTLAKRARDEREVPVGAVLVLNNRVIGEGWNRAIGLHDPTAHAEIMALRQGGLVMQNYRLIDATLYVTFEPCVMCAGAMIHSRIGRVVFGVRNAKTGAAGSLMDVLHYPGMNHRVEITEGILADECAALLCYFFRMPRRVFNAQKKAQSSTDSGGSSGGSSGSETPGTSESATPESSGGSSGGSDKKYSIGLAIGTNSVGWAVITDEYKVPSKKFKVLGNTDRHSIKKNLIGALLFDSGETAEATRLKRTARRRYTRRKNRICYLQEIFSNEMAKVDDSFFHRLEESFLVEEDKKHERHPIFGNIVDEVAYHEKYPTIYHLRKKLVDSTDKADLRLIYLALAHMIKFRGHFLIEGDLNPDNSDVDKLFIQLVQTYNQLFEENPINASGVDAKAILSARLSKSRRLENLIAQLPGEKKNGLFGNLIALSLGLTPNFKSNFDLAEDAKLQLSKDTYDDDLDNLLAQIGDQYADLFLAAKNLSDAILLSDILRVNTEITKAPLSASMIKRYDEHHQDLTLLKALVRQQLPEKYKEIFFDQSKNGYAGYIDGGASQEEFYKFIKPILEKMDGTEELLVKLNREDLLRKQRTFDNGSIPHQIHLGELHAILRRQEDFYPFLKDNREKIEKILTFRIPYYVGPLARGNSRFAWMTRKSEETITPWNFEEVVDKGASAQSFIERMTNFDKNLPNEKVLPKHSLLYEYFTVYNELTKVKYVTEGMRKPAFLSGEQKKAIVDLLFKTNRKVTVKQLKEDYFKKIECFDSVEISGVEDRFNASLGTYHDLLKIIKDKDFLDNEENEDILEDIVLTLTLFEDREMIEERLKTYAHLFDDKVMKQLKRRRYTGWGRLSRKLINGIRDKQSGKTILDFLKSDGFANRNFMQLIHDDSLTFKEDIQKAQVSGQGDSLHEHIANLAGSPAIKKGILQTVKVVDELVKVMGRHKPENIVIEMARENQTTQKGQKNSRERMKRIEEGIKELGSQILKEHPVENTQLQNEKLYLYYLQNGRDMYVDQELDINRLSDYDVDHIVPQSFLKDDSIDNKVLTRSDKNRGKSDNVPSEEVVKKMKNYWRQLLNAKLITQRKFDNLTKAERGGLSELDKAGFIKRQLVETRQITKHVAQILDSRMNTKYDENDKLIREVKVITLKSKLVSDFRKDFQFYKVREINNYHHAHDAYLNAVVGTALIKKYPKLESEFVYGDYKVYDVRKMIAKSEQEIGKATAKYFFYSNIMNFFKTEITLANGEIRKRPLIETNGETGEIVWDKGRDFATVRKVLSMPQVNIVKKTEVQTGGFSKESILPKRNSDKLIARKKDWDPKKYGGFVSPTVAYSVLVVAKVEKGKSKKLKSVKELLGITIMERSSFEKNPIDFLEAKGYKEVKKDLIIKLPKYSLFELENGRKRMLASARELQKGNELALPSKYVNFLYLASHYEKLKGSPEDNEQKQLFVEQHKHYLDEIIEQISEFSKRVILADANLDKVLSAYNKHRDKPIREQAENIIHLFTLTNLGAPAAFKYFDTTIDRKQYRSTKEVLDATLIHQSITGLYETRIDLSQLGGDEGADKRTADGSEFESPKKKRKV

SEQ ID NO: 348 - protein, 1588 aa, synthetic construct
  REGION 1..1588: note = 08. monoABE8.1_bpNLS +Y147R_Q154R_Y123H polypeptide sequence
MSEVEFSHEYWMRHALTLAKRARDEREVPVGAVLVLNNRVIGEGWNRAIGLHDPTAHAEIMALRQGGLVMQNYRLIDATLYVTFEPCVMCAGAMIHSRIGRVVFGVRNAKTGAAGSLMDVLHHPGMNHRVEITEGILADECAALLCRFFRMPRRVFNAQKKAQSSTDSGGSSGGSSGSETPGTSESATPESSGGSSGGSDKKYSIGLAIGTNSVGWAVITDEYKVPSKKFKVLGNTDRHSIKKNLIGALLFDSGETAEATRLKRTARRRYTRRKNRICYLQEIFSNEMAKVDDSFFHRLEESFLVEEDKKHERHPIFGNIVDEVAYHEKYPTIYHLRKKLVDSTDKADLRLIYLALAHMIKFRGHFLIEGDLNPDNSDVDKLFIQLVQTYNQLFEENPINASGVDAKAILSARLSKSRRLENLIAQLPGEKKNGLFGNLIALSLGLTPNFKSNFDLAEDAKLQLSKDTYDDDLDNLLAQIGDQYADLFLAAKNLSDAILLSDILRVNTEITKAPLSASMIKRYDEHHQDLTLLKALVRQQLPEKYKEIFFDQSKNGYAGYIDGGASQEEFYKFIKPILEKMDGTEELLVKLNREDLLRKQRTFDNGSIPHQIHLGELHAILRRQEDFYPFLKDNREKIEKILTFRIPYYVGPLARGNSRFAWMTRKSEETITPWNFEEVVDKGASAQSFIERMTNFDKNLPNEKVLPKHSLLYEYFTVYNELTKVKYVTEGMRKPAFLSGEQKKAIVDLLFKTNRKVTVKQLKEDYFKKIECFDSVEISGVEDRFNASLGTYHDLLKIIKDKDFLDNEENEDILEDIVLTLTLFEDREMIEERLKTYAHLFDDKVMKQLKRRRYTGWGRLSRKLINGIRDKQSGKTILDFLKSDGFANRNFMQLIHDDSLTFKEDIQKAQVSGQGDSLHEHIANLAGSPAIKKGILQTVKVVDELVKVMGRHKPENIVIEMARENQTTQKGQKNSRERMKRIEEGIKELGSQILKEHPVENTQLQNEKLYLYYLQNGRDMYVDQELDINRLSDYDVDHIVPQSFLKDDSIDNKVLTRSDKNRGKSDNVPSEEVVKKMKNYWRQLLNAKLITQRKFDNLTKAERGGLSELDKAGFIKRQLVETRQITKHVAQILDSRMNTKYDENDKLIREVKVITLKSKLVSDFRKDFQFYKVREINNYHHAHDAYLNAVVGTALIKKYPKLESEFVYGDYKVYDVRKMIAKSEQEIGKATAKYFFYSNIMNFFKTEITLANGEIRKRPLIETNGETGEIVWDKGRDFATVRKVLSMPQVNIVKKTEVQTGGFSKESILPKRNSDKLIARKKDWDPKKYGGFVSPTVAYSVLVVAKVEKGKSKKLKSVKELLGITIMERSSFEKNPIDFLEAKGYKEVKKDLIIKLPKYSLFELENGRKRMLASARELQKGNELALPSKYVNFLYLASHYEKLKGSPEDNEQKQLFVEQHKHYLDEIIEQISEFSKRVILADANLDKVLSAYNKHRDKPIREQAENIIHLFTLTNLGAPAAFKYFDTTIDRKQYRSTKEVLDATLIHQSITGLYETRIDLSQLGGDEGADKRTADGSEFESPKKKRKV

SEQ ID NO: 349 - protein, 1588 aa, synthetic construct
  REGION 1..1588: note = 09. monoABE8.1_bpNLS +Y147R_Q154R_I76Y polypeptide sequence
MSEVEFSHEYWMRHALTLAKRARDEREVPVGAVLVLNNRVIGEGWNRAIGLHDPTAHAEIMALRQGGLVMQNYRLYDATLYVTFEPCVMCAGAMIHSRIGRVVFGVRNAKTGAAGSLMDVLHYPGMNHRVEITEGILADECAALLCRFFRMPRRVFNAQKKAQSSTDSGGSSGGSSGSETPGTSESATPESSGGSSGGSDKKYSIGLAIGTNSVGWAVITDEYKVPSKKFKVLGNTDRHSIKKNLIGALLFDSGETAEATRLKRTARRRYTRRKNRICYLQEIFSNEMAKVDDSFFHRLEESFLVEEDKKHERHPIFGNIVDEVAYHEKYPTIYHLRKKLVDSTDKADLRLIYLALAHMIKFRGHFLIEGDLNPDNSDVDKLFIQLVQTYNQLFEENPINASGVDAKAILSARLSKSRRLENLIAQLPGEKKNGLFGNLIALSLGLTPNFKSNFDLAEDAKLQLSKDTYDDDLDNLLAQIGDQYADLFLAAKNLSDAILLSDILRVNTEITKAPLSASMIKRYDEHHQDLTLLKALVRQQLPEKYKEIFFDQSKNGYAGYIDGGASQEEFYKFIKPILEKMDGTEELLVKLNREDLLRKQRTFDNGSIPHQIHLGELHAILRRQEDFYPFLKDNREKIEKILTFRIPYYVGPLARGNSRFAWMTRKSEETITPWNFEEVVDKGASAQSFIERMTNFDKNLPNEKVLPKHSLLYEYFTVYNELTKVKYVTEGMRKPAFLSGEQKKAIVDLLFKTNRKVTVKQLKEDYFKKIECFDSVEISGVEDRFNASLGTYHDLLKIIKDKDFLDNEENEDILEDIVLTLTLFEDREMIEERLKTYAHLFDDKVMKQLKRRRYTGWGRLSRKLINGIRDKQSGKTILDFLKSDGFANRNFMQLIHDDSLTFKEDIQKAQVSGQGDSLHEHIANLAGSPAIKKGILQTVKVVDELVKVMGRHKPENIVIEMARENQTTQKGQKNSRERMKRIEEGIKELGSQILKEHPVENTQLQNEKLYLYYLQNGRDMYVDQELDINRLSDYDVDHIVPQSFLKDDSIDNKVLTRSDKNRGKSDNVPSEEVVKKMKNYWRQLLNAKLITQRKFDNLTKAERGGLSELDKAGFIKRQLVETRQITKHVAQILDSRMNTKYDENDKLIREVKVITLKSKLVSDFRKDFQFYKVREINNYHHAHDAYLNAVVGTALIKKYPKLESEFVYGDYKVYDVRKMIAKSEQEIGKATAKYFFYSNIMNFFKTEITLANGEIRKRPLIETNGETGEIVWDKGRDFATVRKVLSMPQVNIVKKTEVQTGGFSKESILPKRNSDKLIARKKDWDPKKYGGFVSPTVAYSVLVVAKVEKGKSKKLKSVKELLGITIMERSSFEKNPIDFLEAKGYKEVKKDLIIKLPKYSLFELENGRKRMLASARELQKGNELALPSKYVNFLYLASHYEKLKGSPEDNEQKQLFVEQHKHYLDEIIEQISEFSKRVILADANLDKVLSAYNKHRDKPIREQAENIIHLFTLTNLGAPAAFKYFDTTIDRKQYRSTKEVLDATLIHQSITGLYETRIDLSQLGGDEGADKRTADGSEFESPKKKRKV

SEQ ID NO: 350 - protein, 1588 aa, synthetic construct
  REGION 1..1588: note = 10. monoABE8.1_bpNLS +Y147R_Q154R_T166R polypeptide sequence
MSEVEFSHEYWMRHALTLAKRARDEREVPVGAVLVLNNRVIGEGWNRAIGLHDPTAHAEIMALRQGGLVMQNYRLIDATLYVTFEPCVMCAGAMIHSRIGRVVFGVRNAKTGAAGSLMDVLHYPGMNHRVEITEGILADECAALLCRFFRMPRRVFNAQKKAQSSRDSGGSSGGSSGSETPGTSESATPESSGGSSGGSDKKYSIGLAIGTNSVGWAVITDEYKVPSKKFKVLGNTDRHSIKKNLIGALLFDSGETAEATRLKRTARRRYTRRKNRICYLQEIFSNEMAKVDDSFFHRLEESFLVEEDKKHERHPIFGNIVDEVAYHEKYPTIYHLRKKLVDSTDKADLRLIYLALAHMIKFRGHFLIEGDLNPDNSDVDKLFIQLVQTYNQLFEENPINASGVDAKAILSARLSKSRRLENLIAQLPGEKKNGLFGNLIALSLGLTPNFKSNFDLAEDAKLQLSKDTYDDDLDNLLAQIGDQYADLFLAAKNLSDAILLSDILRVNTEITKAPLSASMIKRYDEHHQDLTLLKALVRQQLPEKYKEIFFDQSKNGYAGYIDGGASQEEFYKFIKPILEKMDGTEELLVKLNREDLLRKQRTFDNGSIPHQIHLGELHAILRRQEDFYPFLKDNREKIEKILTFRIPYYVGPLARGNSRFAWMTRKSEETITPWNFEEVVDKGASAQSFIERMTNFDKNLPNEKVLPKHSLLYEYFTVYNELTKVKYVTEGMRKPAFLSGEQKKAIVDLLFKTNRKVTVKQLKEDYFKKIECFDSVEISGVEDRFNASLGTYHDLLKIIKDKDFLDNEENEDILEDIVLTLTLFEDREMIEERLKTYAHLFDDKVMKQLKRRRYTGWGRLSRKLINGIRDKQSGKTILDFLKSDGFANRNFMQLIHDDSLTFKEDIQKAQVSGQGDSLHEHIANLAGSPAIKKGILQTVKVVDELVKVMGRHKPENIVIEMARENQTTQKGQKNSRERMKRIEEGIKELGSQILKEHPVENTQLQNEKLYLYYLQNGRDMYVDQELDINRLSDYDVDHIVPQSFLKDDSIDNKVLTRSDKNRGKSDNVPSEEVVKKMKNYWRQLLNAKLITQRKFDNLTKAERGGLSELDKAGFIKRQLVETRQITKHVAQILDSRMNTKYDENDKLIREVKVITLKSKLVSDFRKDFQFYKVREINNYHHAHDAYLNAVVGTALIKKYPKLESEFVYGDYKVYDVRKMIAKSEQEIGKATAKYFFYSNIMNFFKTEITLANGEIRKRPLIETNGETGEIVWDKGRDFATVRKVLSMPQVNIVKKTEVQTGGFSKESILPKRNSDKLIARKKDWDPKKYGGFVSPTVAYSVLVVAKVEKGKSKKLKSVKELLGITIMERSSFEKNPIDFLEAKGYKEVKKDLIIKLPKYSLFELENGRKRMLASARELQKGNELALPSKYVNFLYLASHYEKLKGSPEDNEQKQLFVEQHKHYLDEIIEQISEFSKRVILADANLDKVLSAYNKHRDKPIREQAENIIHLFTLTNLGAPAAFKYFDTTIDRKQYRSTKEVLDATLIHQSITGLYETRIDLSQLGGDEGADKRTADGSEFESPKKKRKV

SEQ ID NO: 351 - protein, 1588 aa, synthetic construct
  REGION 1..1588: note = 11. monoABE8.1_bpNLS +Y147T_Q154R polypeptide sequence
MSEVEFSHEYWMRHALTLAKRARDEREVPVGAVLVLNNRVIGEGWNRAIGLHDPTAHAEIMALRQGGLVMQNYRLIDATLYVTFEPCVMCAGAMIHSRIGRVVFGVRNAKTGAAGSLMDVLHYPGMNHRVEITEGILADECAALLCTFFRMPRRVFNAQKKAQSSTDSGGSSGGSSGSETPGTSESATPESSGGSSGGSDKKYSIGLAIGTNSVGWAVITDEYKVPSKKFKVLGNTDRHSIKKNLIGALLFDSGETAEATRLKRTARRRYTRRKNRICYLQEIFSNEMAKVDDSFFHRLEESFLVEEDKKHERHPIFGNIVDEVAYHEKYPTIYHLRKKLVDSTDKADLRLIYLALAHMIKFRGHFLIEGDLNPDNSDVDKLFIQLVQTYNQLFEENPINASGVDAKAILSARLSKSRRLENLIAQLPGEKKNGLFGNLIALSLGLTPNFKSNFDLAEDAKLQLSKDTYDDDLDNLLAQIGDQYADLFLAAKNLSDAILLSDILRVNTEITKAPLSASMIKRYDEHHQDLTLLKALVRQQLPEKYKEIFFDQSKNGYAGYIDGGASQEEFYKFIKPILEKMDGTEELLVKLNREDLLRKQRTFDNGSIPHQIHLGELHAILRRQEDFYPFLKDNREKIEKILTFRIPYYVGPLARGNSRFAWMTRKSEETITPWNFEEVVDKGASAQSFIERMTNFDKNLPNEKVLPKHSLLYEYFTVYNELTKVKYVTEGMRKPAFLSGEQKKAIVDLLFKTNRKVTVKQLKEDYFKKIECFDSVEISGVEDRFNASLGTYHDLLKIIKDKDFLDNEENEDILEDIVLTLTLFEDREMIEERLKTYAHLFDDKVMKQLKRRRYTGWGRLSRKLINGIRDKQSGKTILDFLKSDGFANRNFMQLIHDDSLTFKEDIQKAQVSGQGDSLHEHIANLAGSPAIKKGILQTVKVVDELVKVMGRHKPENIVIEMARENQTTQKGQKNSRERMKRIEEGIKELGSQILKEHPVENTQLQNEKLYLYYLQNGRDMYVDQELDINRLSDYDVDHIVPQSFLKDDSIDNKVLTRSDKNRGKSDNVPSEEVVKKMKNYWRQLLNAKLITQRKFDNLTKAERGGLSELDKAGFIKRQLVETRQITKHVAQILDSRMNTKYDENDKLIREVKVITLKSKLVSDFRKDFQFYKVREINNYHHAHDAYLNAVVGTALIKKYPKLESEFVYGDYKVYDVRKMIAKSEQEIGKATAKYFFYSNIMNFFKTEITLANGEIRKRPLIETNGETGEIVWDKGRDFATVRKVLSMPQVNIVKKTEVQTGGFSKESILPKRNSDKLIARKKDWDPKKYGGFVSPTVAYSVLVVAKVEKGKSKKLKSVKELLGITIMERSSFEKNPIDFLEAKGYKEVKKDLIIKLPKYSLFELENGRKRMLASARELQKGNELALPSKYVNFLYLASHYEKLKGSPEDNEQKQLFVEQHKHYLDEIIEQISEFSKRVILADANLDKVLSAYNKHRDKPIREQAENIIHLFTLTNLGAPAAFKYFDTTIDRKQYRSTKEVLDATLIHQSITGLYETRIDLSQLGGDEGADKRTADGSEFESPKKKRKV

SEQ ID NO: 352 - protein, 1588 aa, synthetic construct
  REGION 1..1588: note = 12. monoABE8.1_bpNLS +Y147T_Q154S polypeptide sequence
MSEVEFSHEYWMRHALTLAKRARDEREVPVGAVLVLNNRVIGEGWNRAIGLHDPTAHAEIMALRQGGLVMQNYRLIDATLYVTFEPCVMCAGAMIHSRIGRVVFGVRNAKTGAAGSLMDVLHYPGMNHRVEITEGILADECAALLCTFFRMPRSVFNAQKKAQSSTDSGGSSGGSSGSETPGTSESATPESSGGSSGGSDKKYSIGLAIGTNSVGWAVITDEYKVPSKKFKVLGNTDRHSIKKNLIGALLFDSGETAEATRLKRTARRRYTRRKNRICYLQEIFSNEMAKVDDSFFHRLEESFLVEEDKKHERHPIFGNIVDEVAYHEKYPTIYHLRKKLVDSTDKADLRLIYLALAHMIKFRGHFLIEGDLNPDNSDVDKLFIQLVQTYNQLFEENPINASGVDAKAILSARLSKSRRLENLIAQLPGEKKNGLFGNLIALSLGLTPNFKSNFDLAEDAKLQLSKDTYDDDLDNLLAQIGDQYADLFLAAKNLSDAILLSDILRVNTEITKAPLSASMIKRYDEHHQDLTLLKALVRQQLPEKYKEIFFDQSKNGYAGYIDGGASQEEFYKFIKPILEKMDGTEELLVKLNREDLLRKQRTFDNGSIPHQIHLGELHAILRRQEDFYPFLKDNREKIEKILTFRIPYYVGPLARGNSRFAWMTRKSEETITPWNFEEVVDKGASAQSFIERMTNFDKNLPNEKVLPKHSLLYEYFTVYNELTKVKYVTEGMRKPAFLSGEQKKAIVDLLFKTNRKVTVKQLKEDYFKKIECFDSVEISGVEDRFNASLGTYHDLLKIIKDKDFLDNEENEDILEDIVLTLTLFEDREMIEERLKTYAHLFDDKVMKQLKRRRYTGWGRLSRKLINGIRDKQSGKTILDFLKSDGFANRNFMQLIHDDSLTFKEDIQKAQVSGQGDSLHEHIANLAGSPAIKKGILQTVKVVDELVKVMGRHKPENIVIEMARENQTTQKGQKNSRERMKRIEEGIKELGSQILKEHPVENTQLQNEKLYLYYLQNGRDMYVDQELDINRLSDYDVDHIVPQSFLKDDSIDNKVLTRSDKNRGKSDNVPSEEVVKKMKNYWRQLLNAKLITQRKFDNLTKAERGGLSELDKAGFIKRQLVETRQITKHVAQILDSRMNTKYDENDKLIREVKVITLKSKLVSDFRKDFQFYKVREINNYHHAHDAYLNAVVGTALIKKYPKLESEFVYGDYKVYDVRKMIAKSEQEIGKATAKYFFYSNIMNFFKTEITLANGEIRKRPLIETNGETGEIVWDKGRDFATVRKVLSMPQVNIVKKTEVQTGGFSKESILPKRNSDKLIARKKDWDPKKYGGFVSPTVAYSVLVVAKVEKGKSKKLKSVKELLGITIMERSSFEKNPIDFLEAKGYKEVKKDLIIKLPKYSLFELENGRKRMLASARELQKGNELALPSKYVNFLYLASHYEKLKGSPEDNEQKQLFVEQHKHYLDEIIEQISEFSKRVILADANLDKVLSAYNKHRDKPIREQAENIIHLFTLTNLGAPAAFKYFDTTIDRKQYRSTKEVLDATLIHQSITGLYETRIDLSQLGGDEGADKRTADGSEFESPKKKRKV

SEQ ID NO: 353 - protein, 1588 aa, synthetic construct
  REGION 1..1588: note = 13. monoABE8.1_bpNLS +H123Y123H_Y147R_Q154R_I76Y polypeptide sequence
MSEVEFSHEYWMRHALTLAKRARDEREVPVGAVLVLNNRVIGEGWNRAIGLHDPTAHAEIMALRQGGLVMQNYRLYDATLYVTFEPCVMCAGAMIHSRIGRVVFGVRNAKTGAAGSLMDVLHHPGMNHRVEITEGILADECAALLCRFFRMPRRVFNAQKKAQSSTDSGGSSGGSSGSETPGTSESATPESSGGSSGGSDKKYSIGLAIGTNSVGWAVITDEYKVPSKKFKVLGNTDRHSIKKNLIGALLFDSGETAEATRLKRTARRRYTRRKNRICYLQEIFSNEMAKVDDSFFHRLEESFLVEEDKKHERHPIFGNIVDEVAYHEKYPTIYHLRKKLVDSTDKADLRLIYLALAHMIKFRGHFLIEGDLNPDNSDVDKLFIQLVQTYNQLFEENPINASGVDAKAILSARLSKSRRLENLIAQLPGEKKNGLFGNLIALSLGLTPNFKSNFDLAEDAKLQLSKDTYDDDLDNLLAQIGDQYADLFLAAKNLSDAILLSDILRVNTEITKAPLSASMIKRYDEHHQDLTLLKALVRQQLPEKYKEIFFDQSKNGYAGYIDGGASQEEFYKFIKPILEKMDGTEELLVKLNREDLLRKQRTFDNGSIPHQIHLGELHAILRRQEDFYPFLKDNREKIEKILTFRIPYYVGPLARGNSRFAWMTRKSEETITPWNFEEVVDKGASAQSFIERMTNFDKNLPNEKVLPKHSLLYEYFTVYNELTKVKYVTEGMRKPAFLSGEQKKAIVDLLFKTNRKVTVKQLKEDYFKKIECFDSVEISGVEDRFNASLGTYHDLLKIIKDKDFLDNEENEDILEDIVLTLTLFEDREMIEERLKTYAHLFDDKVMKQLKRRRYTGWGRLSRKLINGIRDKQSGKTILDFLKSDGFANRNFMQLIHDDSLTFKEDIQKAQVSGQGDSLHEHIANLAGSPAIKKGILQTVKVVDELVKVMGRHKPENIVIEMARENQTTQKGQKNSRERMKRIEEGIKELGSQILKEHPVENTQLQNEKLYLYYLQNGRDMYVDQELDINRLSDYDVDHIVPQSFLKDDSIDNKVLTRSDKNRGKSDNVPSEEVVKKMKNYWRQLLNAKLITQRKFDNLTKAERGGLSELDKAGFIKRQLVETRQITKHVAQILDSRMNTKYDENDKLIREVKVITLKSKLVSDFRKDFQFYKVREINNYHHAHDAYLNAVVGTALIKKYPKLESEFVYGDYKVYDVRKMIAKSEQEIGKATAKYFFYSNIMNFFKTEITLANGEIRKRPLIETNGETGEIVWDKGRDFATVRKVLSMPQVNIVKKTEVQTGGFSKESILPKRNSDKLIARKKDWDPKKYGGFVSPTVAYSVLVVAKVEKGKSKKLKSVKELLGITIMERSSFEKNPIDFLEAKGYKEVKKDLIIKLPKYSLFELENGRKRMLASARELQKGNELALPSKYVNFLYLASHYEKLKGSPEDNEQKQLFVEQHKHYLDEIIEQISEFSKRVILADANLDKVLSAYNKHRDKPIREQAENIIHLFTLTNLGAPAAFKYFDTTIDRKQYRSTKEVLDATLIHQSITGLYETRIDLSQLGGDEGADKRTADGSEFESPKKKRKV

SEQ ID NO: 354 - protein, 1588 aa, synthetic construct
  REGION 1..1588: note = 14. monoABE8.1_bpNLS + V82S +Q154R polypeptide sequence
MSEVEFSHEYWMRHALTLAKRARDEREVPVGAVLVLNNRVIGEGWNRAIGLHDPTAHAEIMALRQGGLVMQNYRLIDATLYSTFEPCVMCAGAMIHSRIGRVVFGVRNAKTGAAGSLMDVLHYPGMNHRVEITEGILADECAALLCYFFRMPRRVFNAQKKAQSSTDSGGSSGGSSGSETPGTSESATPESSGGSSGGSDKKYSIGLAIGTNSVGWAVITDEYKVPSKKFKVLGNTDRHSIKKNLIGALLFDSGETAEATRLKRTARRRYTRRKNRICYLQEIFSNEMAKVDDSFFHRLEESFLVEEDKKHERHPIFGNIVDEVAYHEKYPTIYHLRKKLVDSTDKADLRLIYLALAHMIKFRGHFLIEGDLNPDNSDVDKLFIQLVQTYNQLFEENPINASGVDAKAILSARLSKSRRLENLIAQLPGEKKNGLFGNLIALSLGLTPNFKSNFDLAEDAKLQLSKDTYDDDLDNLLAQIGDQYADLFLAAKNLSDAILLSDILRVNTEITKAPLSASMIKRYDEHHQDLTLLKALVRQQLPEKYKEIFFDQSKNGYAGYIDGGASQEEFYKFIKPILEKMDGTEELLVKLNREDLLRKQRTFDNGSIPHQIHLGELHAILRRQEDFYPFLKDNREKIEKILTFRIPYYVGPLARGNSRFAWMTRKSEETITPWNFEEVVDKGASAQSFIERMTNFDKNLPNEKVLPKHSLLYEYFTVYNELTKVKYVTEGMRKPAFLSGEQKKAIVDLLFKTNRKVTVKQLKEDYFKKIECFDSVEISGVEDRFNASLGTYHDLLKIIKDKDFLDNEENEDILEDIVLTLTLFEDREMIEERLKTYAHLFDDKVMKQLKRRRYTGWGRLSRKLINGIRDKQSGKTILDFLKSDGFANRNFMQLIHDDSLTFKEDIQKAQVSGQGDSLHEHIANLAGSPAIKKGILQTVKVVDELVKVMGRHKPENIVIEMARENQTTQKGQKNSRERMKRIEEGIKELGSQILKEHPVENTQLQNEKLYLYYLQNGRDMYVDQELDINRLSDYDVDHIVPQSFLKDDSIDNKVLTRSDKNRGKSDNVPSEEVVKKMKNYWRQLLNAKLITQRKFDNLTKAERGGLSELDKAGFIKRQLVETRQITKHVAQILDSRMNTKYDENDKLIREVKVITLKSKLVSDFRKDFQFYKVREINNYHHAHDAYLNAVVGTALIKKYPKLESEFVYGDYKVYDVRKMIAKSEQEIGKATAKYFFYSNIMNFFKTEITLANGEIRKRPLIETNGETGEIVWDKGRDFATVRKVLSMPQVNIVKKTEVQTGGFSKESILPKRNSDKLIARKKDWDPKKYGGFVSPTVAYSVLVVAKVEKGKSKKLKSVKELLGITIMERSSFEKNPIDFLEAKGYKEVKKDLIIKLPKYSLFELENGRKRMLASARELQKGNELALPSKYVNFLYLASHYEKLKGSPEDNEQKQLFVEQHKHYLDEIIEQISEFSKRVILADANLDKVLSAYNKHRDKPIREQAENIIHLFTLTNLGAPAAFKYFDTTIDRKQYRSTKEVLDATLIHQSITGLYETRIDLSQLGGDEGADKRTADGSEFESPKKKRKV

SEQ ID NO: 355 - protein, 4 aa, synthetic construct
  REGION 1..4: note = synthetic peptide sequence
SGGS

SEQ ID NO: 356 - protein, 24 aa, synthetic construct
  REGION 1..24: note = synthetic peptide sequence
SGGSSGSETPGTSESATPESSGGS

SEQ ID NO: 357 - protein, 32 aa, synthetic construct
  REGION 1..32: note = synthetic polypeptide sequence
SGGSSGGSSGSETPGTSESATPESSGGSSGGS

SEQ ID NO: 358 - protein, 104 aa, synthetic construct
  REGION 1..104: note = synthetic polypeptide sequence
GGSGGSPGSPAGSPTSTEEGTSESATPESGPGTSTEPSEGSAPGSPAGSPTSTEEGTSTEPSEGSAPGTSTEPSEGSAPGTSESATPESGPGSEPATSGGSGGS

SEQ ID NO: 359 - protein, 24 aa, synthetic construct
  REGION 1..24: note = synthetic peptide sequence
SGGSSGGSSGSETPGTSESATPES

SEQ ID NO: 360 - protein, 40 aa, synthetic construct
  REGION 1..40: note = synthetic polypeptide sequence
SGGSSGGSSGSETPGTSESATPESSGGSSGGSSGGSSGGS

SEQ ID NO: 361 - protein, 64 aa, synthetic construct
  REGION 1..64: note = synthetic polypeptide sequence
SGGSSGGSSGSETPGTSESATPESSGGSSGGSSGGSSGGSSGSETPGTSESATPESSGGSSGGS

SEQ ID NO: 362 - protein, 92 aa, synthetic construct
  REGION 1..92: note = synthetic polypeptide sequence
PGSPAGSPTSTEEGTSESATPESGPGTSTEPSEGSAPGSPAGSPTSTEEGTSTEPSEGSAPGTSTEPSEGSAPGTSESATPESGPGSEPATS

SEQ ID NO: 363 - protein, 5 aa, synthetic construct
  REGION 1..5: note = synthetic peptide sequence
PAPAP

SEQ ID NO: 364 - protein, 6 aa, synthetic construct
  REGION 1..6: note = synthetic peptide sequence
PAPAPA

SEQ ID NO: 365 - protein, 7 aa, synthetic construct
  REGION 1..7: note = synthetic peptide sequence
PAPAPAP

SEQ ID NO: 366 - protein, 8 aa, synthetic construct
  REGION 1..8: note = synthetic peptide sequence
PAPAPAPA

SEQ ID NO: 367 - protein, 9 aa, synthetic construct
  REGION 1..9: note = synthetic peptide sequence
PAPAPAPAP

SEQ ID NO: 368 - protein, 15 aa, synthetic construct
  REGION 1..15: note = synthetic peptide sequence
PAPAPAPAPAPAPAP

SEQ ID NO: 369 - protein, 21 aa, synthetic construct
  REGION 1..21: note = synthetic peptide sequence
PAPAPAPAPAPAPAPAPAPAP

SEQ ID NO: 370 - DNA, 306 bp, synthetic construct
  misc_feature 1..306: note = DnaE Intein-N polynucleotide sequence
  source 1..306: mol_type = other DNA
tgcctgtcatacgaaaccgagatactgacagtagaatatggccttctgccaatcgggaagattgtggagaaacggatagaatgcacagtttactctgtcgataacaatggtaacatttatactcagccagttgcccagtggcacgaccggggagagcaggaagtattcgaatactgtctggaggatggaagtctcattagggccactaaggaccacaaatttatgacagtcgatggccagatgctgcctatagacgaaatctttgagcgagagttggacctcatgcgagttgacaaccttcctaat

SEQ ID NO: 371 - protein, 102 aa, synthetic construct
  REGION 1..102: note = DnaE Intein-N polypeptide sequence
CLSYETEILTVEYGLLPIGKIVEKRIECTVYSVDNNGNIYTQPVAQWHDRGEQEVFEYCLEDGSLIRATKDHKFMTVDGQMLPIDEIFERELDLMRVDNLPN

SEQ ID NO: 372 - DNA, 108 bp, synthetic construct
  misc_feature 1..108: note = DnaE Intein-C polynucleotide sequence
  source 1..108: mol_type = other DNA
atgatcaagatagctacaaggaagtatcttggcaaacaaaacgtttatgatattggagtcgaaagagatcacaactttgctctgaagaacggattcatagcttctaat

SEQ ID NO: 373 - protein, 36 aa, synthetic construct
  REGION 1..36: note = DnaE Intein-C polypeptide sequence
MIKIATRKYLGKQNVYDIGVERDHNFALKNGFIASN

SEQ ID NO: 374 - DNA, 303 bp, synthetic construct
  misc_feature 1..303: note = Cfa-N polynucleotide sequence
  source 1..303: mol_type = other DNA
tgcctgtcttatgataccgagatacttaccgttgaatatggcttcttgcctattggaaagattgtcgaagagagaattgaatgcacagtatatactgtagacaagaatggtttcgtttacacacagcccattgctcaatggcacaatcgcggcgaacaagaagtatttgagtactgtctcgaggatggaagcatcatacgagcaactaaagatcataaattcatgaccactgacgggcagatgttgccaatagatgagatattcgagcggggcttggatctcaaacaagtggatggattgcca

SEQ ID NO: 375 - protein, 101 aa, synthetic construct
  REGION 1..101: note = Cfa-N polypeptide sequence
CLSYDTEILTVEYGFLPIGKIVEERIECTVYTVDKNGFVYTQPIAQWHNRGEQEVFEYCLEDGSIIRATKDHKFMTTDGQMLPIDEIFERGLDLKQVDGLP

SEQ ID NO: 376 - DNA, 159 bp, synthetic construct
  misc_feature 1..159: note = Cfa-C polynucleotide sequence
  source 1..159: mol_type = other DNA
atgaagaggactgccgatggatcagagtttgaatctcccaagaagaagaggaaagtaaagataatatctcgaaaaagtcttggtacccaaaatgtctatgatattggagtggagaaagatcacaacttccttctcaagaacggtctcgtagccagcaac

SEQ ID NO: 377 - protein, 53 aa, synthetic construct
  REGION 1..53: note = Cfa-C polypeptide sequence
MKRTADGSEFESPKKKRKVKIISRKSLGTQNVYDIGVEKDHNFLLKNGLVASN

SEQ ID NO: 378 - protein, 1081 aa, Neisseria meningitidis
  REGION 1..1081: note = MISC_FEATURE - Nme3Cas9; WP_002217928.1 type II CRISPR RNA-guided endonuclease Cas9 [Neisseria meningitidis]
  REGION 1..1081: note = MISC_FEATURE - NCBI Reference: WP_002217928.1; type II CRISPR RNA-guided endonuclease Cas9; Nme3Cas9 polypeptide sequence
MAAFKPNPINYILGLDIGIASVGWAMVEIDEEENPIRLIDLGVRVFERAEVPKTGDSLAMARRLARSVRRLTRRRAHRLLRARRLLKREGVLQAADFDENGLIKSLPNTPWQLRAAALDRKLTPLEWSAVLLHLIKHRGYLSQRKNEGETADKELGALLKGVADNAHALQTGDFRTPAELALNKFEKECGHIRNQRGDYSHTFSRKDLQAELNLLFEKQKEFGNPHVSGGLKEGIETLLMTQRPALSGDAVQKMLGHCTFEPAEPKAAKNTYTAERFIWLTKLNNLRILEQGSERPLTDTERATLMDEPYRKSKLTYAQARKLLSLEDTAFFKGLRYGKDNAEASTLMEMKAYHTISRALEKEGLKDKKSPLNLSPELQDEIGTAFSLFKTDEDITGRLKDRIQPEILEALLKHISFDKFVQISLKALRRIVPLMEQGKRYDEACAEIYGDHYGKKNTEEKIYLPPIPADEIRNPVVLRALSQARKVINGVVRRYGSPARIHIETAREVGKSFKDRKEIEKRQEENRKDREKAAAKFREYFPNFVGEPKSKDILKLRLYEQQHGKCLYSGKEINLGRLNEKGYVEIDHALPFSRTWDDSFNNKVLVLGSENQNKGNQTPYEYFNGKDNSREWQEFKARVETSRFPRSKKQRILLQKFDEDGFKERNLNDTRYVNRFLCQFVADRMRLTGKGKKRVFASNGQITNLLRGFWGLRKVRAENDRHHALDAVVVACSTVAMQQKITRFVRYKEMNAFDGKTIDKETGEVLHQKTHFPQPWEFFAQEVMIRVFGKPDGKPEFEEADTPEKLRTLLAEKLSSRPEAVHEYVTPLFVSRAPNRKMSGQGHMETVKSAKRLDEGVSVLRVPLTQLKLKDLEKMVNREREPKLYEALKARLEAHKDDPAKAFAEPFYKYDKAGNRTQQVKAVRVEQVQKTGVWVRNHNGIADNATMVRVDVFEKGDKYYLVPIYSWQVAKGILPDRAVVAYADEEDWTVIDESFRFKFVLYSNDLIKVQLKKDSFLGYFSGLDRATGAISLREHDLEKSKGKDGMHRIGVKTALSFQKYQIDEMGKEIRPCRLKKRPPVR

SEQ ID NO: 379 - RNA, 66 nt, synthetic construct
  misc_feature 1..66: note = Telomerase Ku Binding Motif oligonucleotide sequence
  source 1..66: mol_type = other RNA
ttcttgtcgtacttatagatcgctacgttatttcaattttgaaaatctgagtcctgggagtgcgga

SEQ ID NO: 380 - protein, 1094 aa, synthetic construct
  REGION 1..1094: note = Telomerase Ku Heterodimer polypeptide sequence
MSGWESYYKTEGDEEAEEEQEENLEASGDYKYSGRDSLIFLVDASKAMFESQSEDELTPFDMSIQCIQSVYISKIISSDRDLLAVVFYGTEKDKNSVNFKNIYVLQELDNPGAKRILELDQFKGQQGQKRFQDMMGHGSDYSLSEVLWVCANLFSDVQFKMSHKRIMLFTNEDNPHGNDSAKASRARTKAGDLRDTGIFLDLMHLKKPGGFDISLFYRDIISIAEDEDLRVHFEESSKLEDLLRKVRAKETRKRALSRLKLKLNKDIVISVGIYNLVQKALKPPPIKLYRETNEPVKTKTRTFNTSTGGLLLPSDTKRSQIYGSRQIILEKEETEELKRFDDPGLMLMGFKPLVLLKKHHYLRPSLFVYPEESLVIGSSTLFSALLIKCLEKEVAALCRYTPRRNIPPYFVALVPQEEELDDQKIQVTPPGFQLVFLPFADDKRKMPFTEKIMATPEQVGKMKAIVEKLRFTYRSDSFENPVLQQHFRNLEALALDLMEPEQAVDLTLPKVEAMNKRLGSLVDEFKELVYPPDYNPEGKVTKRKHDNEGSGSKRPKVEYSEEELKTHISKGTLGKFTVPMLKEACRAYGLKSGLKKQELLEALTKHFQDMVRSGNKAAVVLCMDVGFTMSNSIPGIESPFEQAKKVITMFVQRQVFAENKDEIALVLFGTDGTDNPLSGGDQYQNITVHRHLMLPDFDLLEDIESKIQPGSQQADFLDALIVSMDVIQHETIGKKFEKRHIEIFTDLSSRFSKSQLDIIIHSLKKCDISERHSIHWPCRLTIGSNLSIRIAAYKSILQERVKKTWTVVDAKTLKKEDIQKETVYCLNDDDETEVLKEDIIQGFRYGSDIVPFSKVDEEQMKYKSEGKCFSVLGFCKSSQVQRRFFMGNQVLKVFAARDDEAAAVALSSLIHALDDLDMVAIVRYAYDKRANPQVGVAFPHIKHNYECLVYVQLPFMEDLRQYMFSSLKNSKKYAPTEAQLNAVDALIDSMSLAKKDEKTDTLEDLFPTTKIPNPRFQRLFQCLLHRALHPREPLPPIQQHIWNMLNPPAEVTTKSQIPLSKIKTLFPLIEAKKKDQVTAQEIFQDNHEDGPTAK

SEQ ID NO: 381 - RNA, 10 nt, synthetic construct
  misc_feature 1..10: note = Telomerase Sm7 consensus site(single stranded) oligonucleotide sequence
  source 1..10: mol_type = other RNA
aatttttgga

SEQ ID NO: 382 - protein, 83 aa, synthetic construct
  REGION 1..83: note = MS2 coat protein polypeptide sequence
GSVIDVSSQRVNVQRPLDALGNSLNSPVIIKLKGDREFRGVLKSFDLHMNLVLNDAEELEDGEVTRRLGTVLIRGDNIVYISP

SEQ ID NO: 383 - RNA, 26 nt, synthetic construct
  misc_feature 1..26: note = PP7 phage operator stem loop oligonucleotide sequence
  source 1..26: mol_type = other RNA
ataaggagtttatatggaaaccctta

SEQ ID NO: 384 - protein, 128 aa, synthetic construct
  REGION 1..128: note = PP7 coat protein (PCP)polypeptide sequence
MSKTIVLSVGEATRTLTEIQSTADRQIFEEKVGPLVGRLRLTASLRQNGAKTAYRVNLKLDQADVVDCSTSVCGELPKVRYTQVWSHDVTIVANSTEASRKSLYDLTKSLVATSQVEDLVVNLVPLGR

SEQ ID NO: 385 - RNA, 19 nt, synthetic construct
  misc_feature 1..19: note = SfMu Com stem loop oligonucleotide sequence
  source 1..19: mol_type = other RNA
ctgaatgcctgcgagcatc

SEQ ID NO: 386 - protein, 62 aa, synthetic construct
  REGION 1..62: note = SfMu Com binding protein polypeptide sequence
MKSIRCKNCNKLLFKADSFDHIEIRCPRCKRHIIMLNACEHPTEKHCGKREKITHSDETVRY

SEQ ID NO: 387 - protein, 47 aa, synthetic construct
  REGION 1..47: note = leucine zipper polypeptide sequence
LEIRAAFLRQRNTALRTEVAELEQEVQRLENEVSQYETRYGPLGGGK

SEQ ID NO: 388 - protein, 47 aa, synthetic construct
  REGION 1..47: note = leucine zipper polypeptide sequence
LEIEAAFLERENTALETRVAELRQRVQRLRNRVSQYRTRYGPLGGGK

SEQ ID NO: 389 - DNA, 303 bp, synthetic construct
  source 1..303: mol_type = other DNA
tgcctgagctacgataccgagatcctgaccgtggaatacggcttcctgcctatcggcaagatcgtcgaggaacggatcgagtgcacagtgtacaccgtggataagaatggcttcgtgtacacccagcctatcgctcagtggcacaacagaggcgagcaagaggtgttcgagtactgcctggaagatggcagcatcatccgggccaccaaggaccacaagtttatgaccaccgacggccagatgctgcccatcgacgagatctttgagagaggcctggacctgaaacaggtggacggactgcct

SEQ ID NO: 390 - protein, 101 aa, synthetic construct; identical to SEQ ID NO: 375

SEQ ID NO: 391 - DNA, 264 bp, synthetic construct
  source 1..264: mol_type = other DNA
tgtctggacctcaagacccaagtgcagacacctcagggcatgaaagagattagcaatatccaggtgggcgacctggtcctgagcaacaccggctacaacgaggtgctgaacgtgttccctaagtccaagaagaaatcttataagatcaccctggaagatggcaaggaaatcatctgcagcgaggaacacctgttccccacccagaccggcgagatgaacatcagcggcggactgaaggagggcatgtgcctgtacgtgaaggag

SEQ ID NO: 392 - protein, 88 aa, synthetic construct
CLDLKTQVQTPQGMKEISNIQVGDLVLSNTGYNEVLNVFPKSKKKSYKITLEDGKEIICSEEHLFPTQTGEMNISGGLKEGMCLYVKE

SEQ ID NO: 393 - DNA, 267 bp, synthetic construct
  source 1..267: mol_type = other DNA
tgcctgagcctggacaccatggtggtgacaaacggcaaggccatcgagatcagagatgtgaaggtgggagattggctggaaagcgaatgtggcccagtgcaggttacagaggtgctgcctatcatcaagcagcctgtctttgagattgtgctgaaaagcggaaaaaagatccgggtgtccgctaatcacaagttccccaccaaggacggcctcaagaccatcaacagcggcctgaaggtgggcgacttcctgagaagcagagccaag

SEQ ID NO: 394 - protein, 89 aa, synthetic construct
CLSLDTMVVTNGKAIEIRDVKVGDWLESECGPVQVTEVLPIIKQPVFEIVLKSGKKIRVSANHKFPTKDGLKTINSGLKVGDFLRSRAK

SEQ ID NO: 395 - DNA, 303 bp, synthetic construct
  source 1..303: mol_type = other DNA
tgttttgtgcctggcaccctggtgaacacagagaatggcctgaagaaaatcgaggaaatcaaggtgggcgacaaggtgttcagccatacaggcaagctgcaggaggtggtggacaccctgatcttcgaccgggacgaggaaatcatctctatcaacggcattgattgcaccaagaaccacgagttctacgtgatcgataaggaaaacgctaatagagtgaacgaggacaacatccacctcttcgccagatgggtccacgccgaggaactggatatgaaaaagcacctgctgatcgagctggaa

SEQ ID NO: 396 - protein, 101 aa, synthetic construct
CFVPGTLVNTENGLKKIEEIKVGDKVFSHTGKLQEVVDTLIFDRDEEIISINGIDCTKNHEFYVIDKENANRVNEDNIHLFARWVHAEELDMKKHLLIELE

SEQ ID NO: 397 - DNA, 315 bp, synthetic construct
  source 1..315: mol_type = other DNA
tgcctggtgggctctagcgagattatcacaagaaactacggcaagaccaccatcaaggaagtggtcgagatcttcgacaacgacaagaatatccaggtgctggccttcaacacccacaccgataatatcgagtgggcccctatcaaggccgctcagctgaccagacctaacgccgagctggttgaactggaaatcgacaccctgcacggcgtgaaaacaatccggtgcacccctgaccaccccgtgtacaccaagaacagaggctacgtgcgggccgacgagctgacagatgatgacgagctcgtggtggctatc

SEQ ID NO: 398 - protein, 105 aa, synthetic construct
CLVGSSEIITRNYGKTTIKEVVEIFDNDKNIQVLAFNTHTDNIEWAPIKAAQLTRPNAELVELEIDTLHGVKTIRCTPDHPVYTKNRGYVRADELTDDDELVVAI

SEQ ID NO: 399 - DNA, 306 bp, synthetic construct
  source 1..306: mol_type = other DNA
tgcctgagctacgagacagagatcctgaccgtggaatatggcctgctgccaatcggaaagatcgtggaaaagcggatcgagtgcaccgtctacagcgtggacaacaacggaaatatctatacacagcctgtggcccaatggcacgaccggggcgaacaggaggtgtttgagtactgcctggaagatggttctctgattagagccaccaaggaccacaagttcatgaccgtcgacggccagatgctgcccatcgacgaaatcttcgagcgggaactcgacctgatgagagtggataacctgcccaat

SEQ ID NO: 400 - protein, 102 aa, synthetic construct; identical to SEQ ID NO: 371

SEQ ID NO: 401 - protein, 101 aa, synthetic construct; identical to SEQ ID NO: 375

SEQ ID NO: 402 - protein, 102 aa, synthetic construct; identical to SEQ ID NO: 371

SEQ ID NO: 403 - DNA, 279 bp, synthetic construct
  source 1..279: mol_type = other DNA
acaagaagcggatactgtctggacctcaagacccaagtgcagacacctcagggcatgaaagagattagcaatatccaggtgggcgacctggtcctgagcaacaccggctacaacgaggtgctgaacgtgttccctaagtccaagaagaaatcttataagatcaccctggaagatggcaaggaaatcatctgcagcgaggaacacctgttccccacccagaccggcgagatgaacatcagcggcggactgaaggagggcatgtgcctgtacgtgaaggag

SEQ ID NO: 404 - protein, 93 aa, synthetic construct
TRSGYCLDLKTQVQTPQGMKEISNIQVGDLVLSNTGYNEVLNVFPKSKKKSYKITLEDGKEIICSEEHLFPTQTGEMNISGGLKEGMCLYVKE

SEQ ID NO: 405 - DNA, 282 bp, synthetic construct
  source 1..282: mol_type = other DNA
tctcagctgaaccggtgcctgagcctggacaccatggtggtgacaaacggcaaggccatcgagatcagagatgtgaaggtgggagattggctggaaagcgaatgtggcccagtgcaggttacagaggtgctgcctatcatcaagcagcctgtctttgagattgtgctgaaaagcggaaaaaagatccgggtgtccgctaatcacaagttccccaccaaggacggcctcaagaccatcaacagcggcctgaaggtgggcgacttcctgagaagcagagccaag

SEQ ID NO: 406 - protein, 94 aa, synthetic construct
SQLNRCLSLDTMVVTNGKAIEIRDVKVGDWLESECGPVQVTEVLPIIKQPVFEIVLKSGKKIRVSANHKFPTKDGLKTINSGLKVGDFLRSRAK

SEQ ID NO: 407 - DNA, 318 bp, synthetic construct
  source 1..318: mol_type = other DNA
ggcatcggcggaggatgttttgtgcctggcaccctggtgaacacagagaatggcctgaagaaaatcgaggaaatcaaggtgggcgacaaggtgttcagccatacaggcaagctgcaggaggtggtggacaccctgatcttcgaccgggacgaggaaatcatctctatcaacggcattgattgcaccaagaaccacgagttctacgtgatcgataaggaaaacgctaatagagtgaacgaggacaacatccacctcttcgccagatgggtccacgccgaggaactggatatgaaaaagcacctgctgatcgagctggaa

SEQ ID NO: 408 - protein, 106 aa, synthetic construct
GIGGGCFVPGTLVNTENGLKKIEEIKVGDKVFSHTGKLQEVVDTLIFDRDEEIISINGIDCTKNHEFYVIDKENANRVNEDNIHLFARWVHAEELDMKKHLLIELE

SEQ ID NO: 409 - DNA, 330 bp, synthetic construct
  source 1..330: mol_type = other DNA
ggaacaaacccatgttgcctggtgggctctagcgagattatcacaagaaactacggcaagaccaccatcaaggaagtggtcgagatcttcgacaacgacaagaatatccaggtgctggccttcaacacccacaccgataatatcgagtgggcccctatcaaggccgctcagctgaccagacctaacgccgagctggttgaactggaaatcgacaccctgcacggcgtgaaaacaatccggtgcacccctgaccaccccgtgtacaccaagaacagaggctacgtgcgggccgacgagctgacagatgatgacgagctcgtggtggctatc

SEQ ID NO: 410 - protein, 110 aa, synthetic construct
GTNPCCLVGSSEIITRNYGKTTIKEVVEIFDNDKNIQVLAFNTHTDNIEWAPIKAAQLTRPNAELVELEIDTLHGVKTIRCTPDHPVYTKNRGYVRADELTDDDELVVAI

SEQ ID NO: 411 - DNA, 105 bp, synthetic construct
  source 1..105: mol_type = other DNA
gtcaagatcatcagcagaaagagcctgggcacccagaacgtgtacgatatcggagtgggcgagccccacaactttctgctcaagaatggcctggtggccagcaac

SEQ ID NO: 412 - protein, 35 aa, synthetic construct
VKIISRKSLGTQNVYDIGVGEPHNFLLKNGLVASN

SEQ ID NO: 413 - DNA, 114 bp, synthetic construct
  source 1..114: mol_type = other DNA
atgatgctgaaaaagatcctgaagatcgaggaactggatgagagagagctgatcgacatcgaagtgtctggcaatcacctgttctacgccaacgacatcctgacccacaacagc

SEQ ID NO: 414 - protein, 38 aa, synthetic construct
MMLKKILKIEELDERELIDIEVSGNHLFYANDILTHNS

SEQ ID NO: 415 - DNA, 138 bp, synthetic construct
  source 1..138: mol_type = other DNA
atgtgcgaaatcttcgagaacgagattgattgggacgaaatcgcctctatcgagtacgtgggcgtggaagagacaatcgacatcaacgtgaccaacgacagactgtttttcgccaatggcatcctgacccacaacagc

SEQ ID NO: 416 - protein, 46 aa, synthetic construct
MCEIFENEIDWDEIASIEYVGVEETIDINVTNDRLFFANGILTHNS

SEQ ID NO: 417 - DNA, 123 bp, synthetic construct
  source 1..123: mol_type = other DNA
atgaaattcaagctgaaggaaatcaccagcatcgagacaaagcactacaagggcaaggtgcacgatctgaccgtgaaccaggaccacagctacaacgtcagaggcaccgtggtgcataattct

SEQ ID NO: 418 - protein, 41 aa, synthetic construct
MKFKLKEITSIETKHYKGKVHDLTVNQDHSYNVRGTVVHNS

SEQ ID NO: 419 - DNA, 123 bp, synthetic construct
  source 1..123: mol_type = other DNA
atggaagccaagacctacatcggcaagctgaaatctagaaagatcgtgtccaacgaggatacatacgacatccagaccagcacccacaatttcttcgccaacgacatcctggtgcacaacagc

SEQ ID NO: 420 - protein, 41 aa, synthetic construct
MEAKTYIGKLKSRKIVSNEDTYDIQTSTHNFFANDILVHNS

SEQ ID NO: 421 - DNA, 108 bp, synthetic construct
  source 1..108: mol_type = other DNA
atgatcaagatcgccacaagaaagtacctgggcaagcagaacgtgtacgacatcggcgtggagagagaccacaacttcgccctgaagaacggctttatcgcctctaat

SEQ ID NO: 422 - protein, 36 aa, synthetic construct; identical to SEQ ID NO: 373

SEQ ID NO: 423 - protein, 36 aa, synthetic construct
MVKIISRKSLGTQNVYDIGVGEPHNFLLKNGLVASN

SEQ ID NO: 424 - protein, 35 aa, synthetic construct
IKIATRKYLGKQNVYDIGVERDHNFALKNGFIASN

SEQ ID NO: 425 - DNA, 88 bp, synthetic construct
  source 1..88: mol_type = other DNA; note = SaCas9 scaffold sequence
gttttagtactctgtaatgaaaattacagaatctactaaaacaaggcaaaatgccgtgtttatctcgtcaacttgttggcgagatttt

SEQ ID NO: 426 - DNA, 25388 bp, Homo sapiens
  source 1..25388: mol_type = genomic DNA
gggttgtttcagcagttactagctgaatctggtctcagggggacagcaggccatttccgcagcagttagtggaaatattggttcttggagcaggcgctgcgtgcctccagtgcttttcccctggcccctggattctgattccgttgggcataagaagagtgacccaattcgtattatcaactttcacatgctcaataagaatgtatgcatgtaagctatgggtgagtgaatgaatttggacaactcctcctccagtgaagaaaagcagaacttacaaccttgagccacttataaaatactaacatactaccaccacctgtgcgctgtcttctcagaaccatgctcttcccaggatgagtaactgtgtgcttctaagtggaaacctgatgacagtcacccagtcagtgactggcggaccccctattattactcccattctttgggcagggagatgcttaaccggctggaagcacagaggaagggcaggagaacgaagcaagtcacccggcaaacacagctgtatccggaggcctccgggcttccggaggtctcggggcttctgggcttccggtccctcttccggaggcctgggtttccgggacgtcgcgcgccgtgtggggcgcgcacgcagggctgggcgtgagggggcgtgcgcgtgcgcaggcgacgcgccgaggtactaggcagagccgtggaaccgccgccaggtcgctgttggtccacgccgcccgtcgcgccgcccgcccgctcagcgtccgccgccgccatgggagtgcaggtggaaaccatctccccaggagacggtgagtagtggcgcgcggcggctcggagtacctctgccgccgcgcgcatcggctcagcatgcccgtctctgtctcctcagggcgcaccttccccaagcgcggccagacctgcgtggtgcactacaccggtgagtcgggggcccagcggggagggggcccgggccgcagtccgcagcccgggtgcggctggccgtcgaggcctgggggcccggggcctggggtccggggcgtggcggcggcgaggtccgcatggcccgaggctgaggcctgggcggtggctcaggggcagcctggggcttgcggaacccgggcgggtctgaatcggcggctgtgagcgtcggctgcgggctaggtgttatctgacccgtcagaagcatttctgcaccttagatgctgcccttatgcccgctgcacagatgaggaaactgaggcttggcgaggcgaagtcactttcccaaggtctcactttcccaaggtcacactttcaggaatgggcagagctctggccagggaccattaggaaggatttgtaccatttctgtgcccctgcccccacttccatccctcccttcactggagatgaggacgaggtaattccgagtctgcagagctgctgcttcctccggggaactcggaattcgcccctttgcctagggtggggaaacatcccacttcctaagtcattgctttggcccttcctggccttgggggaagtagagctgcacggccttcttccgtctttttacttttgagccacttacaaatccaaggctcagtgacagcgctggctcaggctgaccgaaagctgcacgtgtaatttagtcccccagctcttctagaagtagagacttttctcgtcctcattttaaagataagcatctggaggctaatacatagtgataatacaagccaaaggaaattttagacacctccccctccccagccagaattcagacatcagagtcgtgtgccttggggctgtcttactccttctccttacaagcttgtcctggtttgtatgggggcgggggagggggagagctgagttggcggagactcagtggctgtgggtcccacaagggtggcagtgattggtgtagccacagttgttgatacgaataaccttccctccccctcctccttcccctttctcaaccttcccaccctttcctctgttccccctcctcctccctctttttttcccactccctctcctcctcttcctcctcctgggtagtaggctgtgggcagttctggccaagttgctcacgaataagctccacctttctcttccaaatcatggaaacatggagggatccctctattgagggaaatgactttcactggaaagaggaaaaggcaactaacatcccccctcccatgcccttttatttctgtggcccttccccgtgggtagaaatgggggcaggaggtagaagttaaggactagaactttaaaaattctgccaaaggaggagttactgaaacccatctttctggggagcaggcagtctcatgtccgtgaaggaagctggaaagtgcttttgatgttttagatagctgtccttgtaggccacagtcagcacctgagcctgggaggtctggtagatgaaagcgcatccttttggtgatttgtcatcggaaggatgaggagagtaaccatttacagtgctggggtgagtgggcagttcattcagttccgcagccaactggggcaaagattgggactcaagccgtgaggagctgccttctgccgcaccccctccccaccctagcttgtacatagccacactagggtgcttggcagcatgtgtcccactcccacgtctgcccctcatgctcgcccatgttctggtgctgccaacaggactggaccccagcatgtaggcagtgccgcacttcaccatgtctctttgtgaaatatccccacacagcatgtctggagccttttcctatgagaacagatggtcatgagacccagaacaccatcagggtttccagtgcctcttgaagtgtgtgtttttctcgcgggtggcacgcacccacatgtttccagagcagcagcaggaccctggcatgcattaggacaaaagctttctttttgatttcgttttgataagccctataaagacgccttagtgagaagccagctctgcctcatgctcacagaatagactgttttcgagcaggctggtggctttgttcccgtgggtctttgtcaccagcctcccaggaataacctgtttgagacctgtgggggcgtgagaggagtgggtaggcactgggagatctcatctgtagcagttaaggcttttaagtcactgggaacagaatccatcttgggggaacatgatcagaaggtggaggttataaaggttccaggggttttcaaaggcagaagcccactgggtcctaagaagggaaaagaaataatcatgatgcctctagttctcatctctgttttttggttgttgttttgtgttttgttttgtttcctgcctgactgcctcagtagtctcctgttagagatttgtgtttgtctgcttctcccaactggtgggtggtggaagtcccctgcatgctcccccgtcccccctcccccctcccccctccccatggccagcttctctgtcttcttttgagtatctggctcagatttcttggctgtgattctgattgttacttctctgagaaggagagtttgagtaaggtgaacactcttgatccagtcagctcttgccaggtgtccactcagctgatttgggcacgggtccagagaaagaggggtggaagtaaggtggccaaaatctccccttagccatcacaggtgtgcagagcacagactgacctttaccacatggatgctttaaatgccactaatggctgtcagtcaccttgatgtcactctcaagggtccctctggtgacttccgtgaccttctggcagagcacagcatgagcaaggcctcaaaggaatgcctgcactacctctgtggtaccagagggaaaatacaaagttcactatcaccagctaagcatctcctaggagcatgacaggcattgaggtgggagggaggtggtggaaaggtaagctgccaagtaagtgcctttaggagccagggaattctcatggcgcctccctgctgcctccagtagcttcgtcatctttactgttagcttgtcctggcacacagctaggtttagacctcttttacttacttcagcaggccgtgtgcctgccattgtgagagcagccccaaggggattgaaggaatgttttcttttttcttcttaaaaagtaactaactggacattttgtccttgggatcaggtttaagtcaggtatagcctcccggtttctgactgagaaaaaccaggagcccctcaacctcatgtcctcaggaggttgactgggaaggctgctgaggctcccgggacaggtgtggccactttgctgcagcctccctcaagccccttgcttttccttagctttgttcccccctctcctctgctttattccatccactcccttgctaggtatctcttggttggtgatctgatgtctggagggaggctcaccctcagcagagatgcctcagatggcttcccctgacgtgtgctgtcttgaggcacacaggctgtaactgttgggcagggctgcaacaagtccctttgccttcccacagcagatgttttttgagcaacagcagcaagccaggctctagggacatggctagtgaactaaatagacaaagacctgatctggtggggctttgcttatgatgaggagactgatagtatggccatggagcacatcaggtagtaagaagcgctggagagattaaagcagagtgagggatgggaagggaagttggctgcttttcgtgagggtgattggaaaaggcctctgaaaaaaatggcattttaacattcactcaaaggacattggagagggagctacagggctgtctagagtatccaggcagagggaagagctagtgcaggaccctgaggctggagcctgctcggtgcattagaggaacagtaagaagaccggtgcgttagaggaacaggaagtggattgtgtgaaagggtatgtggcaggagatgaggggatggtggagcctcgttggtttttataaaaacgttgcctttttctaactcaggtgagagccactggctggcttggcttttaatgcccgcccccgcccccccaacccacgctccttctggctactgtgtggacaatgggcttttgggggcaaaggcagaaacaggacactggttgtatcccaggtgtgtggagtgccagctcaggcagtgggcagaagtggtgccaggtggacagtgatccccaaagagcatgtgggttcttcgctgtgttctgatcttgaccctgccatacaacgggctatgagagcttgaacaaattgtcccacagttcccagcttccacatgctgtctataaaatgggagtaacgatgcctgctgtgaagcaaatgcctatcgagactacccagttgtctccaaagtgttgctcttttttaaaaccacagttccattgagcctcactcatcgcagttgttatgtctgtaatctcagtctagaagagtccttacgctgtttttttcttaataactctgatttcttcaaagagagcaggctagttatagaatactccacatctgtcttactgttttctcatggtattgtttaacttgttccctgccttgattttctgaaccggatgtttaatcttttaagtgtctgaatagattccgtttaaacattttagtgtgagtacttcatcctcagcacacatgggaaacatcactagttgtgatgctaaatttgatcttttctgtaaaggtacatttttccctttgcatttagcagtgatctgtggagtgcttaggtagccatagatggtctcttgctcatcagcctttcacctagtggtgtttacaccatctgatcattctcccctgaagaagtcactggcattcacaaagtgttgatttttaaaattccttcattctttctaaatttattagctgttatccttctataagataaggtaaagtaattctttacctttaaataccaaattttatttttattttttgagacagtgtctctgtcactcaggctggagtgcagtggcttgatcatggctcactgtagcctcgacctcccagactcccatcccggcctcccatccggccttctgaatagttgggcatacaggtgcatgccacctgtcctaatttttgtattttttgtagagacgggtttcgccaggtttcccaggctagtctcaaactcctggcctcaagtgatccaccctccttagcctcccaaagtgctggtagtacaggcatgagccaccgtgcccagcctttaattaccaatttttaaaatgaaaaatgaatgttaactgatggggtattgccattcccagtgggggcaagtgactttttccccctctatttgctttgactgtactgtgggctgaaattttttgtcagggccttaagatcaatgatacccattattctttttgatgctaatatcatcctaaatttggccagtaggagccctttaagctggctccagtacctttttgacaggctcccaccattccttcatccatttctcggtttcactactctggtccaattatcagccatctttcaaagagctctggttcctttcagtggggtccatgacctttttttttcttggtaacagctttattgaatataatttacataccataaattcacctatttactcatagatgttttaactagaacatttttaggcttaaactgatttttatgaattactgaggggtttattgtatccataaactggaaatcatttgtctgccttggaattttctctaaaaatattgtcacctgctgtttcccatggaagaagccaaggttatgaataacttaatcacatagcattcagttctccctttggtgctcatggtgacatttgtttatttttacttctattttttcttctgtttttttgttttcttttcctgctaaaaagcttaaccaagtctctgcattccctcccctggacccctttgattttgaccaggtgtattctagcagtgcagaaagtcggggaggtagaaataaccagttcttagatgctactgtctctttctgttacatttgctcttcctctcccaggagctcaagccaccttggcctgcattcattcctcgaatgctccaagccttttcccacatggaggtctctgcccctttgcttaggtgccaccacactgcccccactccccactgcatgacaggctcttttctttatagcacagcttaagtaacactttggatgcatacatgcatgcttctaattctgcaacaatgcacccatctattttcttagcccccatcatagtcaggatccgtgtagttaaacatctgctctttccccaaccgactgaaggctccaggaggccagacccacactagtgttgttctccaaggtctccccatcagtcttggcatagagtagctattcagtgactgtttgaatgagtggccagttaggacctggcattccctcggtcactcagtgaatatataaggagctgggcaaagcctcaatgttgccctcaagaagcttaccctgtagggagtggtcagttacaatgaaagtacctcaggcaacctacacctataggctagaacttcttggaggaagtgccatttggtcttgggtgtgtatggtgcagtcaggcaggaggaaagcgtcttccaggtatatacacaggccaggaggagaaaagggtacctttgatatttctgtaagtacttgatgaatgtctgctatgtacaagacactgtcctggctaccaagaatttaggagtgaagaagacacagttcctgccttcatctcacactgtagtggaaaagacataataaatatgattaataagcaagactgttgtgtataagctagtaagtgttaaggagggaataggaaaaggttgaggttttagatagattggcaaaggcctcaatgagaaagtgacatttgagcaaagacttgaaggaggtaaggatgtaacctatgtgactgtttgagcaagatcattttaggcagagagaacagcaaatgcaaaggcccacgggtggaggtatccctggtgtgtatgtagaacataaggaaacaatgttctgggactggaaaagtacaagagtaatcagaggtgaagtcagagggatggtggtaggggcggaggcttgacacttcttagagggtcttgtaggccattttaagagttttatctcctgagatgggggagtcacaggagtttttcagccgaggggtagtagggtctggctgctgtgtcaggtttagactgtaggagagcaagagcagaagcagggagaccagggagggagttgtaataatagtctgtaacagaggtccagaactcatgcctttaaccattataccctatagaaaatgcatatttctaccacttccagctagctattgttaagtggtatttcttttgatttttttggagatggagtctcactctgtcgcccaggctggagtgccctggtgcaatctcggctcactgcaacctctgcctcccgggttcaagcagttctcctgcctcagcctcccaagtagctgggactacaggcgcacgccaccatgcccggctgattttttgtattttagtagatacagggtttcaccatgttgcccaggctggtctcaaactccgaagctcaggcagtccacctgcctcagcctcccaaagtgctaggattacaggcgtgagccactgcacccggcctagtggtatttctttctccccctccccatgcgatataatgtggtagtaactcctcttatttatactgtgattaaagtggaaaatggagagacacacccacagggcatgcattctggtctgtgttctttttattgccgttggatcctgcatattcttcccatcatgggccctgcctttgaaaatacacttttggttataggatctaaagggatttagccaaaggttagaagcatttccatactgcgtatgggaaatgtgcttgcactgttggtgatctcaggaaaatgatagtgagagtgagctggttccctctttgggttggcacttggacctttggtcatacccctcactcataaggagttctcagaaccccacttcagggaggttgtgctggaatacagccacagagacccagaaatggaataataagaatgtaagatttgaatttgtatcttttgcctatctaaatgtagaatccctttttacccatcatgattgagacaagtgggtagttggtatgctaacataaaagtgacatggcttctgtaaacatttgatttcaaactctaacataaatcatttgctaaaggactatgtctttatctttgaggatggctctgctagtggagtttcccatcatagttcttgcaaaaaccaatttgaccttttttaaagtagagcaaagagtattgtgagaacatttaaaaaccaaacctttccagatttttaagatttctttctctaaatgtagtctcccatatgattattcactagcaatagttttttagtgacttgcctttattgagtctttcccaggagtcagctagaaccgctgtttgtattcacactcattttattgatttacatactatttaattacattatatttacacagtaaatatagctaccataaatggatttggggacaaacacagctaaccactcctccctttgtgaacacagaactcatatgggaatgaagaagtgatcatgagctagagactaaagcatgaggggagtgctcttcactatgctggggtacgaaggctgtgagttttatgagtctccaagtaaggcagctgagtaaaaggtggttaagagaacttctgtgtctaataagaagagggaaagcaaacagctaaaccattagaccttgagccatacgcccatctgggaatgttctgagtggcttcaaatgcaaagctgcagaaaaatactggctccccctacctccacccattcaaccattacacctttttttttttttttaagagacagagtctcgttctgttgcccagtctggagtgtacttgtgcggtcatagctcactgcaacctcaaacctctgggctcaagtgatctcccacttgatccactcaagtagctaggaccatgtctggctaaatttttttttttttttttttaattttttgcagaaacaggattggggacatgagtcttgctgtgttgcccaggctggttgcaaactcatgccagtctcaaactcctggcctcaagtgattctcctgccttggccttccaaagcactgggattacaggcatgagcctcctccgcagctggcctcattgtactttttgtcattaagaaactcacctgcgtgttgaaagtagaaatccttttccctctccaaactgtaaatggcaaggactttattttattttgaaggtttggggcttaggatattctggttttttgttatgtttgatttttggtttagtttagtcatttttttttttttaatcttaaaacttcccatattttgtccctgtaaaatgctgcctataggaaacactcctgcaaagattcatgagcaactataaactgcattgtgagtcatgagctttcactacaagtagtgaagccataagtctgtagaggtgccttcttcagtcctgttacccagtagaaggtatatggcactctgcccttccccaaagcagagtgccttggaagtgactccatttctattgggttattagtgaaatagtatcccagtggtccttgtgaatctccaggtcctggtcttgagtcttaaccaccgcttcagtggcttgagccaaccaccaggaacacagtctggggatactttgctgcccaggagctgctggccaggtctccctctgctgattccttgaaaagcaacaggaaagagcaggctgctgtggagtagacagacttgagactctctgcaccgtcttgttttgtaaacccttttgctccctttccaaggatttcagttcaggaggagacccaggcgaagatgacgtcaacagcctctgcatgcagtcagtcatagctttggcttctttcatggtcttgtgcttttaactggagcacattttcacatttttcttactgattagtaactaaaggtgcttaaagtaaagtttaccattctgggattacccctcatattcttgttaccatatagggaagaaggtctaaatatgaaggcctcatgcttgtccttctggttcttaaaaatcatgcaagtaaagcaaatccaagagtgctcttgagtaccagcaccatacgtgccaccaggacacagaacgcaggccaggtctgtgagcttgggctgcattcagtcaggagagccaagactaaatacttaaaataagaatatggagctattccaggcagtttgttaggcatgagttataggcttgtacggccaggaatgaaattggtcagttctgcaattagaaggcaatgcttgtgatgttttatgctgagtggcctttagagcttaaagactgtcagctgtcttgtctgcactgtaacctcagttgccttctctgagcagggcacgctttctttaggaaattatggcactaacttggcaggtggtttcactgttcaagggctccagctcctggcacaagtgatctccagagttaaaattggagcagctgctgagacttgacttgctgcctgctttacctgttccctccccaaagagaggaagcacttttcattcattgccagtgtgtatgtgggagctaaacatatatagcattttagtaaatgccactgcctactctttttcttttccttttttaaaaaagttactgaggcgtgattgaaatccaatatactgcacattttaaaaatgtacagcttcataaattttgatgtgtcattgtttccctttgaattcacccctccttaccctcctctaacaactactgatatgcttttttgtcagtgtagatttgttgcattttctaaagttttatataaatggaatcatacagtacgttctcttatgtctgccttctttcacttggtataattattttgagattcatctgtattgtcccatgtatcaattgtttgttcctttttgttgctaaatatttttctatatatagaaacatgtatttaccaacttacccgttggtggatgtttgggttagtttatagtttttgactatcgctaataaatctgctttgaacatttgtgtacaagtttttctgtggacatagcctgtcatttctcttggataaatactcaagatcagaatggctgggtcatatgggaggtgtatgtttaacttaactatcaagctgttttctgaagctttatgttatattcccactagcagtgtatgagaataccagttccttcacatcctcactaacacctgacgtggtcagtctttttagctttactcattctaatcagtggtggtagatgcgtttcctagtggttttaatttgcgttgttataataactaggaatgtttagcatcttttcatatgcttacctgccctctgtctttttcaatgaagtatctgttcaaatctttagcccttttttattggttttcttaattgttgaattttggtttgttatattctggatataagtcctctatcagatatgtactttgcaaaagttttctcccagtgtatggtttgtctttcattttcttaacagtgctttttaaagtactgaatttattttgatgaagttcaatttattcttttatagatagtgctttttgacatcatactaagaaatcttcacccaactcgaggtcacaaagatttctttcctatgttttcttctataaatttgataggtttagtacttaacatttaggtctaggatccattttgagttaatgcttgataatggtgtgaagtttttactgtgttatgtgtggatattttgtcatttcagcccaatgtaattttcatctcagacattgtagttttcatctctgaaagttggagtcttatggttctcctctactaattctaacatttgtgttagttctgggttgctttcaattgattgataagtctcctcattgtgggtcctgttttctgcctctttgcatgcctggtaatctttggatgccagacattgtgaattttgccttttggggtgctggatatttttattcctataaattttcctgagttttatactgagaagcatttaagttacccggaaacagtttgatgcttgcgagtcttgcttttgtgatttgttaggtaggtctagagctcagtttagggctgattatttcctactataggcaagatcttcctgagtattctgcccagtgctttgtcaatcatgagcttctccagtttgaccggggggtagtaagcactaatcctagccctgtgtgagcactggatactgttcctctaagccttttggatagttcttttcctggccttgaatagtttgctcagatacatgcactgagagggactctgctgaatactcaaagaggaccctgcagatctctggggatctctgtatagctctctcctgctggtactgtgtcctatggactctaggtgccttgagctccactccaggtccctctccctggaaactcccaaggatatagggctgcccttgtttcccatgtctcaggatttattgttcttcattacagatgtctggtgtcctacaaaccatcgttgtagctattttgtctaggtggtttttaggttttagtggactttttgtagggaggaaggggttggttggttggttgttggttgtttcatgaacaaatctgatccttgtcctccaccgtgaccagaaatggaagttctcactatctgttttgacattacagactgaacagcataattcctacacatgcacactcattccagcttaacaaacactgcttccaccttctcccccaggctgacaacttagggccatagataagtggcctgttcctccccactggggaagccctccttctccttgtcctgtagcttgtgccagttgtgtgacacccacttaatcacataccaccccacccatttcgggggattattgtttagctttcggactcgattatgggaaatcctctccttggactcaaggaaccccaacatcactgccaccacccaaccctgccctgcgaagatttctccttagaaagtagatgagattgacagttggtgactgtggtctgaaattctggagcaagtctcatgcccctttcccagggacaacagagcatccaaaatagcataggaaaattaagatcctaggcaaaggtcctgtttaaagctcctttacttagaaatcctgcttcctggcttttatggttttaagatactagggagaggtttgcccctcagtgtccaagataggctcaggagagctggggttagacaggcatcctcacatagagccactgaagaacatacacatctccatgctggctcagcagcagcagcagcagcagattcaggctgtgtcctgcctagtgctcctagcctggtaccagtcagatagatagttgaagtatctcacctcaggcaaagcaacattgatacattgatgcatgtagtgtctggaggttgcttggcattgcatttgatcaggaataaaaaggaagtttagggagtctgtctcagtaccctgtggctttcactgcaatcaaaatacgatcttgcacaggtcagagccgtgttcaagtttggcaagaaataaggctaattttttataggtataccgtactttccaaattgtgggttatgaaccattaatgcatcatgaaataaatgtagtgggtcacaatcagcattctttttaaaaatgagaagtatatgccatgtagtaacttacatgtaaattttgtttatacacagacaaaatgtgggtgtgtactgggtcctgacatgagacactgttcccattgtcgcggatcagggatagttctttgtggttttagttgttgagttctgtttctttgttattcctttcgtggcagcactacattgtagcgtgctcactaagtgtcagaggtttacctcacgccagttgtgttcatttggctgcaggtaactgaagacccaacctaaggcaaagcagacttctttatttttgtaagacttcattaagagcagtttcagattctcagcaaaattgagaggcatgtacagagatttcccatatatcccctggtcccacacatgcatagcctcctgttatcaacaccccccactagaatggtacgtgtgttgcaattgacgaacctgcattgacacatcatgatcacccaaagtccatagtttacattagggttcactcttggtggtgtacattctgtgcatttggacaagtgtataatggcatgtatccattatatatagtatcatacagaacattttcactgccctaaaaattctctgtgctccatctgttcttccctccctctacccctgactcctggcaatcactgatctgttgactgtcatcctagatttaccttcaaagcacacttttaatcacctcagaacatgagtcttgagggaagtggtttggggctgattcagagcactggaatgaccaccttgtggtacgcctggccttctgatagtcacagggtgactgccatgctccagacatcttatcctcacacagcattcaacagggagggcaggaactttcttcccgagtctttgtttttctttttactaatgaggtgggactttcctggaagatcccagtagacttcacagcaggtaaagtagtgcccaaactgacccgtataggggaagggcttggattgattcgagttcatctgctgggccaggctgttgttgctgtcgttgctcctgggaagttgttgtttaattaggaaggtgagggtgccacacagccttgcttccaggtggcccctctgggcatgtttttcttaaaataacagaccagagagaagctctttctggttttcagtctcctttgtggctcacaggccctgccactccgtggttctgaccttgggtgggttactgagccttggagtcggtttccttatttctgttacaagcagtctcacgagggtggatggaaaggctccctgcctggccagggaatggagaatcatagctgttcattgcctgctctcacccttacctctgaggttggttgggttgggttccatgtaagaagtgcagcttgaagtgggctaaaggcagtgtgtttattgggtattgtggagcctggagacctgtttttctcccaggtactcatttatagagaactgttcaagtcctgccattagtcatttctttcatcaggtggtgactgcattctggtaaacgaatgagctaaatgcataccccagctcaccagttctggggcaccagttccttggagcaggtaccggtccccaccctcctgtctacctcttagtcctcagctcccagctccaggcttcaggcagcattggtacccattctgccccaggacatccgtctctactcctgctctattaagataccaccacccaacccccacccgtttcttactttgttaaagtccacatagtccagtagctgtgataacactgccaattcatctctgcctccccatcctacttacaaatgttgacactgttttttaggttgggatttttgtcaggattttctttttttcctaaactcttacacaacagaactgtaatgtttttatggatcttctgagtaatgaatgcttagaaccatggtgagtgcccaccctcagtcttccagtaaaatcagttttgtgtccattatatgttaaccactggctgaccctccaatctgggatcctaattagagaattctcaggaactcagtgtcagctatcacaataggctggcagtggcttcctgagaaagcaatgccgatggtgtttttgaaaaggaagttgcagatatctattgcagatgtctgttcctcttttctcatagcgtctctggagttccccttttattggaaggcgccgtcgtggcttgtccagcttctgggaaactggaataatagaaagagcatggtatttgggtttataatttataacgtagttttactattttactaaattataaatttactatttttataatagtaaattttactatttactattttcacttctccctgtctgcctcagtttcttcatctgtgaaatggggatagtgctgtggagaaagaattgcattcgttcatgtgtggaaagcacctagcccatttagagtaactcagagtggaaccactggccacagagttgctagcagttggctgggtttactgagttaattcttgaagggccaccactgcaacctccttagtattcctgttctcttcagtcatctctgttacaaagtattagctgtgcaaaaatgagcatgggttgttttgtggggcagcattggataaaataagtgggatgaatgctgcacaaattctttctttcatttctctatttcagcctaggttggtttttactttcccaggaaaattatgacaactcaggaaccagcctacaaggggccagctttacgccccaggttccctgttggtgtgagacacttggcactagaatgagggtgaaagcttgccttatagcttcctcttaccacatcccatagtgctgacccacagcctggagagcagcaatgtgtgtaggtcacaattagtgaaccacagaggagcccatgggggtggcagatggtggagggggatttgcctgcactgaacaatggaggagcaatatatacacacattatatgtgaaagatgatgggggattttgggaaggaatattgcttcttgcactgtgtgtgacttctagacatagtgtgcacctcgagggaccacagttatttttagctggggagaaaatccacggggtgctgggagagtcagggcaggaggaagtttatactccccatctccagaagaaggtggactgccgctcatctctggtacgcggggtccttttgtagtcgagttattgcttggagtcagggaagagcattcacaggtctggagtaggactgtcgcaactccttagatgtccagtgaggtcacaggaaaccctccctagatactgcagttcctgccagactcttcagcactggcatctctgatgagtgctctgctgctggtttctgacttgtcttgtgtcattactctgctgctcatgttacagtcgtctttttcacagggatgcttgaagatggaaagaaatttgattcctcccgggacagaaacaagccctttaagtttatgctaggcaagcaggaggtgatccgaggctgggaagaaggggttgcccaggtatgctctctcatttgttttgttttgctttctagtatttaccttttatatttttttataggtggcatatttatacggttcaaaaataaaaaaagtgaaaagtctcaccctcatgccatcccatctgaccaatacccccacaagaagctcctgttgttaatgtttcttgtactgtggtttaagcacatataaaaacataacttttttcttgctttcacacacatactgttttgcagtttactttttcacttaatgcatttttgacacttgcaataccactacataaaagaggagtaggctgggcgcggtggctcatgcctgtaattccagcactttgggaggccaagatgggtggatcacctgaggtcaggagttcctgtaatcccagcactttgggaggccaagatggatggatcacctgaggtccggagttcgagaccagcctggccaacatggcgaaaccccatctccattaaaaatacaaaaattagccgggcgtggtggcaggtgcctgtaatcccagctacttgggaggccgaggcaggagaatcacttgaacccagcaggcggaggttgtagtgagccaagattgtgccattgcgctccagcctggatgacgagagcgaaactccatttcaaaaaagaaagaaaaaatgaggagtaagctctgttacagctgcctagtattcgtttatgtaagtgtgctataatttacttggctagtgccctattaatgagtatttgagtcatttccagtattttgctattataaacaatgctgcagtaactcaccttgtacagacttcattttccacgtgtgcacatgttgccataggacttactctcagaagtgggatgaggggctcaaaagctgtgtgtagtgtttttgagaggtcttgtcaagttaccatctctaggggttgcactctggactgccaccaccaggctataaaggtgcaatctcctcccagccccagcatcacagtatattgttaaatctttggcctctggacaataagagtaaaacatgatatcagtggttttaatttgtatttatctattacccatattgtgtgagaccacttctgagacgtcatacttatggagaaagtcatttcgtttgtcttgagtgtgtttcctaatctctttcctccccatttgtggaaacagcttttgttctgccaacactacaaaattcccaggagacaatagggacccagggttgccaaattttagttggattctgtctttccatcaaacctaggaattttttcttggctctaaccaggtaaagggatgtttttcagtgacctgagacccaaggaactttataattaggctctgcatgatgggtaattagtctgcttccctctcacccaggagaattagaaatttaaccaagatgaaaagacagatttctgtctctctcttttccagaatacacattgctctacttcctctataaaatatcactgatttatctccaaataaactgctcaactttcaggaacttgaagccatcccactcccaggtgtctgggtttctgttcctgcagggcagagggttggcagtgtgaggaagaggctttgtagtttacttcccttgggaaaccttgccaaccatagctttttgcctctgtctccctagtctgtctggctcttggatctgtagcccatcccccatctttcatgccagccattgttcataccacaacccatcttctgtgactgctccagcattggaacaatcactgcgttgtatgtactgagtgctgtatctgccatcgagatagtgttatcggcctacttcacttcccaggcttggagaggcatggtcgagtattggacagatgcctgactccccctttaactggtattttggggtcagtcacagccctgtcatttgtgagaagtctgggtagtttgagatctacataaaatatcttttaaattcttcatagcatattttttcaccaagtgagttaaaaacacaggaagaaggggagattgacttgtgacccttttcctttccttttgatattgttttggttttacatgtttgcaggcgtggagtcctgcctgccacaaggaccattttggcagctttctttcatccatcttggacatcttttcatgttaatacatttaaagccaccactatatgatttctcatgactaatccctggtgtggatatgcctatgaaaccactccttctgtgatggacttttgagttgttagcagaatattctggaaatagaattgctgagtcaaggaatatgattgttttgaattgtacaaggtaaagccatacctcactatccttaccaccttggtccaacatgtcccagcttctgaggggagcaaggactagacgcttcacagcctggagcttcctctttattcatcctctgtctggtggagttggaaagtcgggaacatacacatggagaccaaaagcagagataagtcaaaggatggaaatactgcagagaacctgctcactgttcagaaagtagatattttatacttatttgtgtatttaatttgaaactgaaaatatacacaaatatattttttaaagtagaaatctctccttactggtcactcactatccatactgttctcctcacagcaaatgtctggtatgtccttccaaagatgttttctgttgtaggcatatcaatattttcacaaatggtattcagtaaatgctattttgtagcccagaaaatcatattgtcttttttgaagttttcctatatgggtaaaagagtataaatagaaaaaatacagaaaaaatagactaccctcaagtattacttcctgtgtatatatttttttaaagcaaagttgagtattcctttttcaagaagagcatagatggcacttaacatgtcctttaagtgacagatcactgaaggggactaggtggtgagacatctggaatgttacctgcctagcattagtcattaagacttgcgtagaaaggttgagggcctgaccgttctgagagtcaggaggggttttgaactgccattgggcttcttggagtgagatgcaggggtgatggaatatgactgccaacctccaagtcctgcacaaggaggtggtgatgcctgggcagctgcaaagtcactggaaagtcaataccatcctggccaaggaacacctaggtaaacagctctttttcttacagagacagttggggcatgtgtccagctgagtctgtcttccttgttcttttcacagatgagtgtgggtcagagagccaaactgactatatctccagattatgcctatggtgccactgggcacccaggcatcatcccaccacatgccactctcgtcttcgatgtggagcttctaaaactggaatgacaggaatggcctcctcccttagctccctgttcttgggtaaggaaatggaatactgaagggcccttcactgcctttgctcctcccatgttatgcccagcgtttgatgggtagcagagagaacaaaaaacaccacaaggctatttttccccctgcattctttctgtattgagtatcctttcagtgttattagtgtatgctttgaatgtaaaaattggtcaccctaaggaaaggaattggcatgtgtatgttcccagttcaactcatggagatggcagctgtttaaatgtttttctatgtagtttataaattaaaactgaattgaggactatggaaatgtaggccaaatttgtagtgccaacattttagttctttggaaataagactcttaatgaatgactttgttctaccctgtgtttctagaagctagagggggaaaaaaaaagccctttggatatgaatatcatgtcctagcttctgcggctctctcttcactgtggtttgtggttactgcctattagatggtatgagggaggcattcctgcatcggtccacctgctcagggtccacacccaggacacttgaggcccccaggccagcttatcagtgagtgaagtggaaaaatgaagccagaggatgcttgtgaagttgaaaggatgctcttagatcagacagttctaggaagggatcttaggggcctctgcatcagctttattgtgcaacagtaaggaaacagggccagagagaaaggccttactcaaggtcacatccaggcagtggcaaagtaggaccagagcccctgtttgttgattttcccctcttccaccctcatttcttaggaactaaactcagtatcctagtagcacgtaacttttcatgtaagtgttagaatcattaagtacatgaatgctactggcttccttccaactggccccagacctttttatttgctcccctcctgccataggaaccagagggtcacagccaaggcctgggtgaggacacttttgtttgaaagccacaacaaatggctgccatcctatttgtgatggcagtcagagctacttgtaacctggtcctgttgtgcacatctgtaagtggaggggctttttaaactctctgtttgaaccacacacaccttggtaatacaggcctggttaagtttgataactggtttcttcacctgtcattgctactgggagggaatccctggcactttacagggcctttgtctgcccagaggtctgcacctaggccaaaatccctttcctgttctttgagagctgagtcattttttgaacataactgtactcgagggagccttggaattattttcctggttgggaacaggctttctgtaaacttgatgaggtagagggaggggagagagggataaaggctacaagtcaccccgagtaaccctcccaacccactgccaaagaatgtctcagcttcttgcaagagtctggaaggaaaatccaagggcaaacccagaaagttttaagttgagtgaatgaatgaatactggagatattttcccagtatactcaacattatgaatgaccagtttattctcagtctggactgcacatgagagtcacctgggaaatttttaagactttcctgatgcccaggtcaaaccctaaaccagttaatcataatcatgggagtggaacccaggcattaagagttttttaaagcccccaggtgatgcctatatgtagcacagtttgagacccaatgatagtggggaactgtattgtcagcagcatgggtggctagccctcctgctgtcctcagcaaggcaaacttaaccttagattaaacaaaacacacagatcaatttaaggagaaagtttgtttcacctgggacccagcccaagtctttctggctgtctccagctggaacagaagtggcttggtctcagactgctcagctgttggggaagggatttggcgtggcagatggcatcgtggctgtcgccactgcacacaaagaacactgagttgctggaaactcacagattttctgtccccaacagatctgccatggagggatctggtgcctccagacatgtgcacatgaatccatatggagcttttcctgatgttccactccactttgtatagacatctgccctgactgaatgtgttctgtcactcagctttgcttccgacacctctgtttcctcttcccctttctcctcgtatgtgtgtttacctaaactatatgccataaacctcaagttattcattttattttgttttcattttggggtgaagattcagtttcagtcttttggatataggtttccaattaagtacatggtcaagtattaacagcacaagtggtaggttaacattagaataggaattggtgttggggggggggtttgcaagaatattttattttaattttttggatgaaatttttatctattatatattaaacattcttgctgctgcgctgcaaagccatagcagatttgaggcgctgttgaggactgaattactctccaagttgagagatgtctttgggttaaattaaaagccctacctaaaactgaggtggggatggggagagcctttgcctccaccattcccacccaccctccccttaaaccctctgcctttgaaagtagatcatgttcactgcaatgctggacactacaggtatctgtccctgggccagcagggacctctgaagccttctttgtggccttttttttttttcatcctgtggtttttctaatggactttcaggaattttgtaatctcataactttccaagctccaccacttcctaaatcttaagaactttaattgacagtttcaattgaaggtgctgtttgtagacttaacacccagtgaaagcccagccatcatgacaaatccttgaatgttctcttaagaaaatgatgctggtcatcgcagcttcagcatctcctgttttttgatgcttggctccctctgctgatctcagtttcctggcttttcctccctcagccccttctcacccctttgctgtcctgtgtagtgatttggtgagaaatcgttgctgcacccttcccccagcaccatttatgagtctcaagttttattattgcaataaaagtgctttatgccggcttttctcagctctgtgtcatggtggttattttcaggtgcctcccctgccatttggtgcagggggatggggttgggcagggtgaaggagggtggcagtggggatgcagtttcaagattgtgtcttggcagaagaatgcagcagtgaacatccttcctcactggctattaacgggttgggggtcagaggagggggaatgtggggtaggtttgcatcaaaggagctgcctgaaagggcaagctgggatagtcagggaacatcccctcccctgttaccaaatgtttattaaatatgtgttctgggtagagcactatgctcggggttcttgggttacagaaaagtgggagatacaacacatttttgagaagtgagtcacagtccacttggagatgtgctacaagcaactgcaagcaaattaatgagatacgaagagaagactctgattttaaattggtattcctcagtaacatttaatgtagaaagacagtcctgtggagaggctgcgtggttgcagtagcttctctggaccctgccctgggtgccaggaacactttgcccttactgagagttctagagaccgtcaagaatgctcccacacctttctagacacc

SEQ ID NO: 427 - DNA, 32767 bp, Homo sapiens
  source 1..32767: mol_type = genomic DNA
tgacatcctttgcaacttctgccatttaatctatctcaagcaagctctctggaaacaaatctatttgaaagattctattgtaattagaaatcagggtaactgaatgcactagatgaaaaccttctgactggggccaatgaagtcaataaagtcaaaactgctgtgaatgctcaactgtctgcagatcagatgtcttgggatggaatccgttctcgaggccaccatcattaatatcaatttggccatgtaatacaagcctcacttgttccactgttacaaatgtgcttaaaactgagctcatttacaatccaaatacatatgtaggatggtaaccaaggcatcacactaatttaggtattatgttttagggggaacaaaaggtatgttaatattttattcatctccaaattaactataaattgtgcattcttgcatagatcctccttgggaatgagaaattaggaaaatccagttgttaaaatgaatgcctaaaatcaaaataaaatttgtttttctggcacctgcttgatgacacagactaataaccaatgacaaaattgcccttgaacccaagttttcatttcctcctattgtgtggtcaggttatgtaagggtttgctttcaccccattcaaaaggtacctcttcctcttctcttgctccctctcgccctcattcttgtgcctatgcagacatttgagtagaggcgaatcactttcacttctgctggggaaattgcaacacgcttctttaaatggcagagagaaggagaaaacttagatcttctgataccaaatcactggaccttagaaggtcagaaatctttcaagccctgcaggaccgtaaaatgcgcatgtgtccaacggaagcactggggcatgagtggggaaggaatagaaacagaaagagggtaagagaagaaaaaagggaaagtggtgaaggcagggaggaaaattgcttagtgtgaatatgcacgcattcatttagttttcaaatccttgttgagcatgataaaattcccagcatcagacctcacatgttggtttccattaggatctgcctgggggaatatctgctgaatcagtggctctgagctgaactaggaaattcaccataattaggagagtcactgtatttctctccaaaaaaaaaaaagttatacccgagagacaggatcttctgatctgaaattttcttcacttctgaaattctctggtttgtgctcatcgttggtagctatttgttcatcaagagttgtgtagctggcttcttctgaaaaaaggaatctgcgtcatatctaagtcagatttcattctggtgctctcagagcagttagcccaggaaaggggccagcttctgtgacgactgctgcagaggcaggtgcagtttgtgtgccacagatattaactttgataagcacttaatgagtgccttctctgtgcgagaatggggaggaacaaaatgcagctcctaccctcctcgggctttagttgtaccttaataacaggaattttcatctgcctggctcctttcctcaaagaacaaagaagactttgcttcattaaagtgtctgagaaggaaggtaggttatatttttattcccattctatagctgggtaaagtgagttctaacaaagttacttgttaaaggtcactcagaggtcagagcatcagaaaaaaagacaatcacaaggctgatgttgtgtgctggatagtttaaactgaacaggaagaaaacatttttgtgggctttatctaaaaagaaatagtttgctctgagtttctcagtttcatttattcagcaagtatgtgccaagtgctattgtaggcaatgaagatacagcagggaacaaaacaaaactgacatggagcttccaactagaaaggagaacgagacaacgcgttttaaaatatatataatgtgttaggtaaaaagtgctataaggagagctaaaacacaatgagaggctagaagagtgatagtggcggaggggcttctctgaggagatgacatttgatcaggggtctgaataaagtaaagaggccagttatgtgaatatctggaagactcaaggggcagggcggaaatagccagtagaaaggccctgaggtaggaaggtgtgtggcaagtttgaggaaaaggaaagacagtctgactggagcaaagagaactggagctgaggccatcaaggcagccaggagccaggtgcagactgggctttgactctgcctgcagggaggaactgctgaaggttccaagcaaaggaccgccctgacctgccttaggtttgaacaggatccctctggctggtgtgtgaagaattaactgtagatgggcaagtgtggaaggaaggagagcagtcaggaagctgccataaccatctacatgagagaggtaaggcctcagatggaggggagcagtggaatggtggaaagtgtttattttgaatgttaagcctgcaggagttgctggaggattggacatgggggatgagaaaaagagagaggcttacagatcaggtaatttagctgatcttaagccccttacagcttaatattattccaaggtgccaataacagccaaggtaaacaaccttgtcttggacattctgcctttatttgcccacacaagatgaaattaaatatatatatatatatataatttaaataaataaattatatatatatataatttaaataaataaattatatatatatatatttagtgctgtttccatcagctactagctgagacacttgggcaaatgagggtgatctccagtcctcagtatccttgctgttaatgagagatggtcatttcttctctgcctagctcaaaagaatatgttaaataaaactctgtgaactttaggcagcacaggcttagggcttcttagtaacatcatcagcaccatcagagttaacttcatgagtcagttgagttgcctttggggtatatcattaacagattccaggaagctcccctgcccaaaagcctcccaccaatggcctgccttgttgaaagaattacacaattagcccaattcctttccattaaggcattgtggactccaaacatcctcctttaaaatggaaactaaatcgagctactgtcagtcatttgtccttttaggtgacgttatatatcagatcacttttctgccattagagctagttgaagtttgaatagggaaaaggaacgaatgaacgtggggcagagaacgcaatagtcggtgggttactcagtaggctgtggacagatggagaggatcccggtgggaggagcctctaaagataaactttctatgggaaaatgttgacagatttacctgagtcatggtttttcttacacctcataaaaatgaaggcttccaagggcagctccttgaaatagctgtaacaagtagccacagaagttgagttgcttaaagaaaaacattgaattcatggggaaccgtacgctttaatagcccctttggcttactttgtttaaacaaactcatcccgagcatctcacacttcaccaattttgagtgtccctgctttacctcagccttttaaagagtgtctttcccctaaatatttctggaaatgcctaagggtgctgacgtgcagccagaaatagttcacttctgtccccactatggcaggaatccatggaccaaggctctgatgtttccacaaagatgcccctcaggactagaaatctgtccccatccccgttgccaccacagtcaccatcacctggaaatcctgcaggaccaatgtttgtgaatttggaatatatgctagatgccttactaccttgttatgaccttatttctttatagcacttttaacctagcgcattacatattttaaatgtataattcagcgatccagatcactggtccagtgtcacctcccactcagcaaagtgagatgaacacacttggtgctacattcagctaggctggcactgtagatgcacccagtcccaggtattctagtggctcatgacagggcttcctcactggagacatgctgagccaagcaaggcagtttttaccaccaaccctgatagtcgtacacatattctgctcctccacccccaccaaggttgaaactccgctcctgtcagctttgcagctaccaccaccccctcagggagagtcatctctgttcccaaacccatataaatgtcattcaaagccagaggatgtaattgctgtagtaattgttatagtccactcatccaggggccccactgcaaagctgattaaaccatagtgttactaccttttacagagttattattcttccaaatcaacccactgcacctttctccaaggctacaaaagtgcccctagggtggctgtgtacaggcaagttttgatgtcagctgggaaactacctataacccccactctctgctaacaccaacttttctttttctattttattttattttattttactttaagttctgggatacatgtgcagaacgtgccggtttgttacacaggtatgcatgtgccatggtggcttgctgcacctatcaacccaccacctaggttttaagcctcgcatgcattaggtatttgtcctgatgctctccctccccttaccccccaccccctgacaggcccgggtatgtgatgttcccctccctgtgtccacatgttctcattgttcaactcccacttatgagtgagaacatgcataacaccaatttttcttattggaattgtagtgccagtttagttcttcagtggaagcacttgttcttctctataatctgttctccatctgggaacaccctactttctcagacataggtttgcagtgcattggtgggcaggatttcagtcctttctctgaaagttcctaagccctattgaaaaatgaatgcactggggaagggtgtggcccatctctctccccagaagctcctgagccacatttcttacccagtcccggaaccctggtatcctaaaccatgtctgaacctgtacccctgtggccccagaaagggaccaaacagtacatcccatgaaaccacaaagagatcataaccttctcctctctcctcccacatctctacataaacaacatttatatagatgactgaattcaagatacgtttatttggtactgatggtcaactggaagttcctaagcagaattacttataatgtgggactgtgtttttagtggttgcagtgaaggctcaacacccctaaacacggtgggaacttgctgaggaggcaggctgtgaagggcagggtattagcatctttccttaaaataacatgtgtcttagtgtgctcaggatgctacagtaaaaataccatagatttggtggcttaaacaacaaacatttatttctcacagtctggaggctgtgaagtccaagatcaaggcactgacagatccagtgtctggtaaaggcctgcatcctagttcatagcccgctgtcttctcactgtcctcaagaggctgaaagggtgagagagctcttccgagactctttcataagggcactaatcccattcatagggctccaccttcatgacctaattacttacaaaggccctacctcctaataccatcatattgggggttaggatttcaacgtatgaattttggggagacacaaacattcagtctatataacaacacgtaccgtgaaactttcctactcataaaagtaatatatcttcactggagaaagtaaaaaagtacagaaaaatatgtagaagaaaatctaccatcatctcacatccagagatatccatggtaaatattttaatacaattcctgtgaagttattcagtacacattaatagagtttgaaaacataatctaatataaaagcatgaaattcataaagatattttaaaataaagttaatatgtatgtgtgtatatgtatttttatatatacacaaacatatatgcttattatttttattgtgagcattcccccatattattagaaaaccatgattttttgttctttttctttttcttttcttttcttttttttttttggagatggagtctcactctctcacccaggctggagtgcagtggtgcaatcttggcttactgcaacctccacctcccaggctcaagcaattctcctgcctcagcctcccgagtaacagggattacaggcccctgccaccatgcccatctaatttttttgtatttttagtagagatggggtttcaccatgttggccaggctggtcttgaactcctgacctcaggtgatctgcccacctcggcctcccaaagtgctggaattacaggcataagccaccgcaccagaccaaaaaccatgatttttgatggcatcatcttatggatgcaatataattaatttaaccattcttctactagttaatattaaggtcatttccaacttttattgttgttacattgcctctcattttctttataaatatttggctctttttattttggatatgttgtagctaaaatgccatccagatagtttattctgatttagtgcccaccaggttctaggtgcatgactgccatagcagagatagttgcatacagttcaagtttagattttgtttgtgagcgggagaatccaaagaccaagttcctaatattcttttgcctgaaaaatggctacataaccttgccaaatctcttaacattttcatgcctttgtttctaatatggaaaatgaagatactcaccaatttgtaactgtaaactactacacaagaatgaggtattcatttaaccatatggtgagattttgtagttaaaattaattaattgtgctcagtggtcagactactggctttaaatcctggatccattattcattacttcctattgtgtaacctgggcaagttacttaacttctcttctccttagtttcctcatctataaaatgaataacagaagcacttaccataagtgaggatgagataagatggtggtatatgtgagtggtacacatctgttactattattatcattgttatttattattaagcagtgaatttagactcaatgtgaaatggtttagaagtcatcagcttcccgtttcatgttcttaaagcactggtgataagagtatgcctgtatcatgcagttataactttaatcaaaatatgaaagtaactttaatcaaaatgccaagtcaaattagcaaagtcagcccttttcaaaatgtgtgccctaaagtaataaggtctgcagggtgtgccccagggacctttggtggggagtgggtggtagtcagaatggcgaaaacagtggggatttttagggcccccactcacattgctttgcttttatagcaaaaattgttggctgatgaacaaaatcatttccttttcttggactcacagctagacctaacttcccaagtcctgtacagttaaatgttaccatacaattacagtggagccatatgtgtctgtctcaaccacccaagcctgccattgcagtgtgaaagcagccataggcaatacttaaacaaagggatgtgctgtgttccaataaaatgttaccaaactttcctatagtttgccagcccctgaactagagcatggtaaggcaagagagaattgtagaacgtggttggaaaggcagaaggagtcagggaggaaagaccttgtggaactctagcacaaagtttggattttatcctaaaagcagaagggaagcctttgaagggttttagaaaagggtatgacctgaattacagaagctcagtcctcagcagatcagtatttcaacattcactcaccatgtgaaccattgatcccattttgttacttcctctgtagaatctcctcttaaggaaattgaaagcaagctcctgaatgagatggcattttcagggaaagaccaggaggcagaccccaaggggcttcacaagatggcatttttgtggccttggtggatttgccatgaccttggcttggcaggatcagaaacctgaatctattcgcctgtaagtcctcttttcttgtaagtcctataagacttacactaagttcaggtgattaacatattaagtcaaaaagcccattttagtaatttttaatgaaaaacataattgccacatgtgagaagcccattctattttcatagacatacttatattagaataacaatgaccataatggttagcatttattaacaataacattgtgccaggcacagtgtcaagcattttccatgatgacctcacaagtctatcggtaggaattgtggttaaaaccctcttatagataaagtcagaggttctaaacttataagatcacaatgctagtgagtggtagagatgagatttgaacccacacagtgtaaaccagagtgtggatacctagccactacaacatagtgtctcataggagacatgttcagaaggttgctagtggacattgaatccatgggggaaaagaaggcagaaaaatctgattttaatgttatcaggttaatggggcctgatgcagccatcttgcagaagaacggtattgctagcaggtcctccatgtttgtttacaacactggctacggccttcccactaggatgggaattcccaaatcctataatttcctagatggtgctggaagaggcactgctgaggtttgttttgccaactatctttcccctcttcttcttgccttatttgtcattctatccattaaggtgacttttcatccattttatatgaatttcataattaacctctcagggtaattcccccagcccaccctactatcagggcagtccccaatatgactaatcattcccacatactaagaccacagactgcttcagaatctgtatttatattttcactattaaaaaactatgctatcgtttcctgaaatctctatgaaaaaaaaatactaagctatatctggagtgaaatggtcagtaagaacacagtttgtcacacaaaataatgaaaatgctatttcttacttatagtgcagactggggttcttcctctagaattagaaatattaggcttgctaagatgtgatggggagttcattggggctagtgttttagcttttgaactcttcaaaaggaacagaaatgaagaaaaagacctgctttaataaacaaggttaagtctgtatgatttatggacttatgagcaaatctgacatccactcacatgggtggtcctcccaagggataaacttcgtaaaagcacatttaagaaaaagggagcagatactgttggtgccctcttcaccaggagacacactgaaaggctgcagtagcacatcagagcctcacaggtcagcatcagccaaacagctgttctgtgcatcacaagaattcgtacatatttcaaaatgactaatttgtacctatgagacaggatttgacccactaatttttgtaccgtaacgttttaataaaaattgttttttcaaagcgaagctttgctgagcagatgaattatcatgtgggagtttaaaaattagtcaaaggagtcttgacaactaagtcctttaagcttggccttcccttggcctctgcctactcctgatcataatctgaataaactttaacttttcgactagaatgcaaaacacgtgtttttgtaaaacgaatattaatggcataactcgtgctttattattttagctgatttgtatcaatgtatcaacattccaaagaaaatagggagcatatgttggttaataatttttgttatgactattgacatgtaattcacatgacataaactttaccattttaaaaagtacaattcagtgagtttgagtatgttcttaattttgtacaaccatccccgctatcaaatttcaaagcatatccatcacaccaacaataaactctggttctattagtagtcactcccaattcccttttccctagccccctggcgaccactaattaattatttctctgtctctatggatttgcctaccatgaacattgcatataaatggaatcacacaatatgtagtcttttgtgtctggcaccttccactcaacatactgtattaaaggtttctccatgttatagcatgcatcgatccacacttcatttcctgttatggctgaataacattttgtcctctgaatctaccatatttgtttatccactcatgagctgatcacttaggctgttgccacttattagctattatgaataatgttgttatgaacgttcatgtacaagtttttgggcagacatgttatttctcctgggtaaattcctaggagttgaattgctgggtcatatagtaactctatgtttacctttttgagaaaactgccaatatgttttccacagtgtctgaaccattttataatttcgctggcaatgtatgagagttccactttctccacatcttcaccaacatttattttcctttttttaaaaaacaattattgctgtcctagtgggtatgaagtgatatctcctgtattttcaatttgcatttctgtaatgaataatgatattgtgcatcttttatgtgcttattggctagttgcacatcttctttagagaactatcaggtcatttgcctttttttgaaatgttggttgtctttttattgttgaaatataaaagttctttatatattctagatctagacctttactggatatatgacttgcaaattctaccatttctgtacgttgtctacaatttcaaccattctgtgggttgtctttttattttcttcacaacgtcttttgaagcagaatagtttttcattgtgatgaagtccagtttgactatttttttcttgtgcttttggtattgtaactaacaaaccattgactaatccgagattctgatgtacatacatgctttcttctaagttttataattttagcttttacatttaagtttttaatccattttgagttaattttttaaatattcttttgcatgtagctatccagttgtcccaatgctatttgttgaataggtgattctttcctcattgaatggtcttggtattcttgtaaaaaatcagttgactgtaggcatatgggtttctggactctcaattctacccgactgatctgaatgcctatcctcatgccagtactacactgtcttgattactgcagctttgtagtatgtaagtagtagtacgttttgtgagtcctcgaactttgcctttttttatagattgttttgctattttgagttaagtatttttttaaaacatcaagttaaaaatgaagctgccactctctaaaggaggacaatttcagaaaggcactgagacctgtgcttggtatgtagtaggtgcttttgaaaatgtttgttgcatggaatggattgatttcatctctattctaacactcaatgccatgttcatttcccctttggagcctttcatctctcccttctcttttctaagaaaatcagtaactctctcattcatacattgtacacatacatatctttatttgtttatgtgtctattttccactaattagactataatgccatataaggctagaattacatctaattcattgctgggtcccaaagccatgcttaagaccataagtatataggggttttttttcttttaaaaagtttttatttttaattattatggatacataagagttacagatatgtaaagggtacatgtgacattttgatacaagcatacaccatataatgatcaaatcagggtaactgggatatccgtcacctcaagcatttgtaatgtatttgtgttagaagcattgcaattccactcttagttattttgaaatatacaataaatttttgttaactgtagtcaccctgttgtctactgaacactagatcttattcctcatatctgactgcattttcgtatccattaaacacccctcttttttattttttattttatttattattattatactataagttttagggtacatgtgcacaatgtgcaggttagttacatatgtatacatgtgccatggtggtgcgctgcacccattaactcgtcatctagcattaggtatatctcccaatgctatccctcccccctccccacaccccacaacagtccccagagtgtgatgttccccttcctgtgtccatgtgttctcattgttcaattcccacctacgagtgagaatatgcggttaaacaccccctctttatcccccctccccactacccttcccagaccctagtaaccatcattctattctttctctctctgagttcccacatatgagcaagaaatgtgatatttgtctttctgtgcctggcttatttctcttgcataatgtcctccagttccatccatgttgatgaaagagacataatttcattcttttttatggctgaataacatttcattgtgtatatgtacaacattttctttattcatctgttggtggacacttaggttgattccataccttggctattgtgaatagtgctgcggtaaacatgggagtgcagatatctcttcgatatactgattttctttcttttgggtatatgtccagcagtgggattgctgggtaatatggtagctctattttgttgttgttgttgtttttaggaaccttcatactgttctccatagtggctgtactaatttacgttcccaccaacagtgtatgagggttcccctttctccacacttttgagagcatccgtaattccctgtctttttgatagaagcaattttcactgggatgagatgatatctcattgtagtttagacttatatttctctgatgattaaggatgttgagtatttttggccattcgtatgtcatctattcagatcttttgaccatttttaaatcaaattattttttcctattgagttgtttacacaacttatatattctgtttattaatcccttatcagataggtagcttccagatattttattccattctgtgagttgtctcttcactttgttgatggtttcctttgctgtgcagaagccttttagcttgaggtgatctcatttgtccacttttgcactggttgactgtgcttttgatgtcttattcaaaaaatatttggccagaccaatgtcatctcttgccatatacaaaaatcaaatcaaattggattaaaaacctaaatcgaaggcctgcaagtatgaaaccactagaataaaacaatatatatgtgttggagggagagaagaaagtaatgaagaaagaaaggccaggtgagaaagtaagagagaagggaaaatgaacaagaaagacaaaagtcattccaggcactgttttaaggggcatctcatttattcttacaaccttatgagataagcactcttactttcagtttgttcaggatgctataacagaatcccatagactgcgtgggttataaacaatagaaatttatttctcttagttctagtgactgggaagtccatgatcaaggcactgacagaactgttatctggtgaggacctgcttcctggtttacaaatggacagccatcttctcttcttgctttgtcctcacatggtgggaaggggtaaagaagctccctgaggcctcttttatatgggcactaatcccattcatgagggctctgccctcatgaccaaatcacctcccaaaggttccacctcctaatgccatcaccatggggttaggatttcaacaggaatttggaaaggacacagacattcagaacatagcacccccattttacagataagaacagtgagaaacagagagttaaataattttctcaaggtcatacaacgaacccgtagcctaggcagcctggctctttggtcatgttcttaaatactatgccatactgtctctcaaataaacactaaaatcaagatacttgggatgatcgttgggaggcagagcccagatatctatactttaaacaaattcccaaatgatctgatgggcaactcagatgaaaatcaatgcttcaagaaatagccaaataaaactctatggaaggtaaagatggggagagcttggtgagatgtcatacttgggaggaaaagccagggaaagtaagagaaaactgggtattagtaaagatcatggagaagggaaaacacaagatattgctaggctaaaaaagaggcagacctgatgaagcagtgaacaccacttcagccactccctaccttggccccagctggccctggctgtgactgtgttccatactctgcaatgacatgtaacttccaccacgtccatatcatacctaaagcctacttcagtgtgtccacaaaagcaagtaagaataaaaagtaagagaaacaactcacatttatttgctgcttattatgtgccaggctatgtccttttttttttgagatagagtctcactctgtcacccaggctggagtgcagtggtgtgagcttggctcactgcaacttctgcctcctggggtcaagtgattctcctgcctcagcctcccaagtggctgaaattacaggcacgtttagtagagatggggttttgctatgttggccaggctgatcttcaattccagacctcaagtgatgtgcccacctcagcctcacaaagtgctgggattacaggtgtgagcctccacacccatgtgccaggctatgttttaagtgctctacccatgagaactcacttagtcctcataacaatcctgtgaggtaggtactattgtttccccccattttacagggaaggactctgaagcacacagaggttaaggagtttatcaaggtcactgtagctaacaagcagcagaaccagattcaaacccggagcccacactcttaatcactatgttgcttctagaagaaagaaaataagggatgaaggatagtaaaaacatgcaagcccttctgagccccctgttgttggccccactttggcaggagtgttaggaagactatgggaactcaaaggtgacacttagcactctcctccagaggctacaggagccatcattggtagctagccatttgtatcccccgtgatggtggagaaaagcccacactgttgcaagtttccagaattttctctgctctggaaaagactcccaaactagggttaatcaagtatcttttttggtgaatttcattaaaattaccacataaaaaaagaagaatttgtcctgaattatacatataggagaaaaatgataaaataaaataatttccattatctttgtagcaaaaaaagttggaatgattccaccaggttctctgaaggactttgttttcaaaggagatgttaaaatgtgtaaaatatccaaaggatacacttttgcagctgaatttaggatcttaagaaacatggttttaccgtgtttcccaatgattgttgaaaagaagcagtgactgggttacatctagggcagggtttctcagcctcggcactattgacattttgggccgggtaattctttgttgtggggggctgtgctatgcattgcaggatgtttagcaggatccctggcttctacccactagatgccaataagattctccctttccatctgtgacaaccaaaaatgtctccaggaatttccaaatatcccctagggccaaaatcacccagttgaaaactagtgttctagggaaaaccattataattaatagcatgtctatgatctcccctgttgcgggaagtcagggaccccaaacggagggaccagctgaagccatggcagaagaacgtggattgtgaagatttcatggacatttattagttccccaaattaatacttctataatttcctatgcctgtcttcactgcaatctctaaacacaaattgtgaagatttcatggacacttatcacttccccaatcaatacccttgtgatttcctatacctgtctttactttaatctcttaatcctgtcatctcctaaactgaggaggatgtatgttgcctcaggaccctgtgataattgtgttaactgcacaaattgtagagcatgtgtgtttgaacaatatgaaatctgggcaccttgaaaaaagaacaggataacagcaattgttcaggtaataagagagataaccttaaactctgaccgccggtgagccagggggaacagagccatatttctcttctttcaaaagcaaatgggagaaatattgctgaattctttttctcagcaaggaacatccctgagaaagagaatatgcccctgagggtgggtctctgaaatggcccccttgggtgtggctgtcttctatggttgaaactgtagggatgaaataaaccccagtctcccatagcgctcccaggcttattaggaagaggaaattcctgcctaatatattttggtcagaccagttgctctcaaaccctgtctcctgataagatgttatcaaagacaatggtgcccaaaactttgttagcaattttaatttcgcccccgtcctgtggtcctgtgatttcgccctgcctccatttgccttgtgatattctattaccttgtgaagcgcgtgatctctgtgacccacacctattcgtacattccctccccttttgaaagtccctaataaaaacttgctggttttgcggcttgtggggcatcacggaacctaccaacatgtgatgtctcccccagacgcccagctttaaaatttctctcttttgaactctgtccctttatttctcaaactggctgacgcttagggaaaatagaaaagaacctatgtgactatcggggcaggttccccgatactccccaaagtattgcatggaatgccacatttcttttatcatagtgcttcaaataagtatttcagtgtgttactgaaaatatttataaacaaaatatatttgatagcagggtatgaatatgcccgtgtccttggaagagaaagaggggacaagagaacaggtataacagcatgttgttggtgaaaataaattggtagtaatatagattgaatatcccttatccaaaatgcttccgacaggaagggttttggatttcagatattttcagattttgaaatatttgcagaatacatacaggtagagcatccctaatccaaaaatccaaaatctgaaatgttccaatgagcatttcctttgagcatcatgatagcactcaaaaagctttggattttggagcatttccgatttcagaatttgggattagggatatttgacctatagtaatgccaaatactgcactaaaattagcaaatgtaatctcattgaattgtgacaacagccttaagaggaaacccgatcattatgcctacttagtagatgaggaaacagaggtaactaggtcaaggtcacacaacttggagtgtcagagtctggattctttctagttctgccctcgtccaagccagttctgttaacactattcttcctttcagcataatctgtgtcatcactggagcttatgtctacctgcctgccacccagcaccaactgtttaccctttaagtctcattctgcctcctccaggagccttccctgacccctgccttcaccttctgacctgtgccccttcacaccctgtgccctcttaactgggaaagccctgagggcaggggccataccttatttacctctatctccagctcactgcacagaggcattcagcagatgaccagtaaatatgggctgtctagtaaaaactttgcagttagagataatgaaagaaacataattacttctgtgtgggttgagaaagaagggaagggaaagtccagatacttaagcagaaaaaggcaaacagtccaaaaggggaaaagtaacttgcccaaatcatgcagttgagggcaggaagaaagggggacaaagccaaaaccaaaacccagtcccttgtcccagcccagtgctttgtctgctacgttacacaaactgtgattgtgaaattaaagggtttttgatggcactgatataagtaaataaatggctttatgagttaacacatgacaagcaataaactcataaaaggtaaatattgacaactgaagattatatatcactatgtttagtgtgtggagaacccaactaggaattaggaaagcttgcacattcagtctggtttcttggcaaatcaatgagacttcaaacaaatcattttatttctctgtgcttctgtttcttttggctgtagtattttgctggttaaagagcacgtgatcaatgtctatgcttttaaatgtctgtctttatttgagcatgctcagctggatgtggaaaacctatggttctcttgggtttcataaggatcaaatcccacagtgatatgtaaacttgtgtggtttatagaattataggacctcaaagctgggagaggcctgataaatcatatagtgaaaatttccagccagtgcctggatttcttttacagaatctttcttttattggacaggtgctcccttcacaatccatgatgtaaggagaaaaggggcttcgtttgaaggaagttagtgtattgtgtatgggcgtgtactttctgcttggggtgtgcctacagggctatctcactttctgaaagcgtaataataagttactttaccatgcattaattaaatgtcagagaccatgctaaatgctttacagagaatatcttttttaatctgtataagaacctcctgaggcagataatattattaaccttacttttcagataaggaaactaacattcagaaaagttaagtaacttgctaaagacatgtgtctactaggaggtagagtctcaagtctatttcaagctcctaataagtaaataaatgtctattgaatccaactaatgacatcccactccatattcccctgccactgatgagagagagaagtataaagtttatgtaaataagacagaagcaatgttttatataagcattgtggatttaattccactaagggattgatttttcatcttaatggaactttttcttcagctatcaagtttcagtttcaagatcgcaaatgctaagaagatattaaaatattttaatacataattccactagatcatatttataggtactgttaatatattaccaaatctactataaacaaaacaataaaacaaaaggctggatcaatatggaaagtagagtaataatttaggccctaaagaaaaactacgtaagacatttcttagaggattaccaggtttctctctctctctctttttaaacacagcctaaaatagaaaagcaatttatgtattaataaaaaaaatagaaacctgaggcagatgtaaccagaataggtgaattaactgaagactgatattcttatttatgtttgtgtattttaaataaagaaggagtttgaccatctcatctagttaatcattaaaaggaaactcgagccaaacttgtgaagcaggtaaagtttatttttagacattcaactggcttctcttttgggctccccttttcttttggggtcatcctccatgtctggtaaccttaacctccctgtctcttccagaaggagcaacacccccatgttttagacctttacttctgatgtcaggaccctttctgatgcaagtgttagctaactccagctggctgaagaggaaggaggaggaagagaaggagggggaataatgtattgaagtgtgtaatagtcaagtctaggagcagccctcaccttaggatctagacattcatattatataattgggaatctatttccagatctctttgctttttttttttgcaaacctcaatccaatggagtctctaagtggtagaccacagctgctccaagcttgcatcgtatcagcttagctattcctgttgagaaacaagacaagtttccaagtagtcccagaaagccaagaattaaggtgtatctgtccctgtcatgtgcctatctctgatattaccagacctggcccatgcagagttacagatgggttaataccaccataagcgcatggaccaaagttagggaaaggatagttttccaaaggaaatgttaggtcctagtatcatatgtggagaggggatacttggcaagtaaaacagtacctatctaccatgtggccacaacagggcagatcagggtccctggtaggatggaggcagccatcaagcattatggtatccctgaataatcccttcccagttcatatgtaaaccaatcctcttaaattgttaatgcatttaacataaggatggattcagcaaaactgtatcaatagcaaaacatgaggggtctccagctagtagcctgtcctgcatagccatccatgactactgctctaattgattttttctagaatgtctaaaggaagatgaaagtagaaaatgagctgtagtggacaagcatttttaaaatgagcccaataatgtagcacttttgggtgcttgataattgttgcaaatcacatttgcctgagaaatttcaattctataataattgtacaatagcagaaagatctagatacaaaaatattcattgcagcatggcttgcaatagtgaaaaattgaaaacaatttacatatacttcaataaggaaaggttaaaacaatggtatactatgctactattacctgaaaatattgaaaagatgaaaagatgtccaataacatttgatgaataaaggttgaaaaatacatgtagtaaaatctcatttttgtttttaaaaaacatatatgcatgcatgcatccatgtatagacaaaaaggatttgaaaatatacaataaattatagttaatcacatttaccttatggtactgcagaacatcagaactcattcctcttatctagctgtaattttgtaatcgttaactaatctctccccatcctccccttccccctgcccttcccagcctctgatagtcacaattctactttctatttcacataataaaagtttttaaagaggggaataatggggtgggggatctggaatatacataaaaactcaaaaataattacaaatttgttgccatcaaaatataaaaagaaaaaaatagttacatctgcaaaatgggattgtgtgaggaagtttttacctttatacatttctaccttctgtatgtttggatttttacaataagtatgtgttattttctagcatcttttgaagtttttttcttaaaggcataagtaatatctaaagttatttttcatccttctaatgccgtctacacaaagataacgatttttcttggatggccccaatctctcttctgtaagatctttccccatttgtcatatccataactcataacctcctcacccttcactgctctccattttctctataaagtgagcccagtcagtacttgtaggcttgttaagcattacttctaataagaaagactaacttgtaaagcaaatgtggaaatgtactaatatagcatcaagcacaaaatagccattcaataaccgaactatttaattccttttttttcacacttcatcctttccctaattccagaaagaacttgaactgggtcataacaaagacaaatttagacagacagataaagatatctcataggtagaaataaaactgagtgattataaactaatcacaggaggctctgttagtctgatgaacagaaacacacgtgataaaatcacagagaggtaaaatagaaaatgaaaatcaggatcaagaaaagggaaataaaaatatgctggacatcattcaataactatttgctgatggtaattatagggatggaaaacccatcaggcctatggagctaaaattaatcagcaagtattcacagagtgcctactgcttctattactggttctggcttcctgcctgcccagtgcagaggcttgagacatttgcgtgacattcagcttgtcaagacagaaggagcaaaataagcagacagaggctcactgcagccgcctatacccatcatattgttggaatcatattcaagtgagacaaactccttcagtggaagacgataaaactagcttaaaagttgtaaacatcacttcatcacccaaaaaaggcccaattaagtggagatactatttctgcaaagcaatcatcaattcatttgtgtaacatttgaaatttcaaagtacaaacccacattctattaaaggcaggaagtgaaaccaataaaacttgtaacaactatacttaattttcagggttctttccattgctgacaaacattttaagtcatgtctattctcttaaaatgtaaaatatgatgtttatgtcactgttaatattttgataaaaagctattgtcatggacatctgggtttttttctgcatgcccagaaatcccttttctcctatttaaatttaaaatctccaattatttggagaagcacctcctcttctctctctttcatttgtaccccattcttaggtgtcagtggtgggcacttgagctaggctttgcccatcatagtacacattcctgacatcccttggtcatagttattggtccagggataagcatttgaaccaactagaccagtgaaacccctcccaggaacaactactaaaattatgggaaaagaactctttccactgaagttactaacctggcaggatgtgttaaatccaggtgccacaggccaccaggtggagaggtggagataatctttccagaaaacaaaacaaaacaaaacaggaaaatgaagctaagggataaaatttaagccctttggacttcatttgagcccctgaatccagtcatgcctcctgaaattaaacttcccctggacttttcagtgaatcaaaaaactctgtttttaacagtggggtttcttataaatgcaccaaaaaatgacctaatgaatgttgtctacaagcttccattagaagtattatcttcaagagaaaaaaaaaacaaataacttgaagaaaacccttcataattcaagtcagtcctgctaacctctaggaaaccctccgtgaccaccatctccatatccacacccattttcctaaccttaaacaccagatgacttcttgaagcttatgaagtgccctatgcatctaacacatttctgtaagtctgcattgttctataatgacttgtaaccgtatctgtctccatttcctccagagaagagattgttatcattttgatatccctgcagccttatactggggcctaacatataatagttgctattttgttgaaggaattgtattttgttgaaggaattctcttttgttgaaggaatgaatggagagaatattaattaagaaagtctcttctattaataaacattccctgattgattgaaaccatgcctaaaatagctaatcatcagaagaccaaagtaaacaacatatccaaactgaatcctcaaagtgttagtcattggtagctgtatagctgagaatctttccttcttctggtcattagggttgaaagggtgggtgaatgtggagacatgattctttcttttgcaaaacatttactattttttaaactccataaaatgtaataacttctcttgaaaaatgttaaaacccaaacaaaaaaacctgtaatgtggaatatagattgtaggttataatggaggaagcagggaaagtggggaaaactgtggttgccagaagttttctgataactaataggcaagacaatagggtggcttttggtagggtccttctttatggcatagcaaagaaaaataggaatgaagaagtgagaagcatgaaaggggacagcaatatatgtgtaacacagggtgattcagtgtgagagttttataattaaaattgccaaatgtgagaaaaaaaaatctactataaattgggataggctcaaggcatggagatgaacaaataacccctccatgtgggcaaaaatcaatgaaattactagatgagtagcttagtatgtgagttccagttgcaacatgttactggtatttggggcttcccctcccccctccccccctgcactttgaggcaattcgacatttgactaacaatccagcctaactttctccatctgatataaagatatttaccttgaaatcctagaactgccaacatctcctacttcctactacaaccctccctgactccttttctctggcacagctttctatgcactcaccccattcaactaagcctgcttactcttcaccagaaggtcttctcttagcataaaaagttcctggaagtccatctctttcatagagctgctggatgactgctttgcttacctttggccttcaaaatacctctcctgtccaaccatagctccccagctcccctgccattgcaaccaatacaaacttcgtcatctttccttgggccaatgtgcctgtctcctcactgctctccctgctttctcccttagcccctacaactcatactccacatcgcaagcagaacgagcttttcaaatagtaaattagattatgtccattagtgtgttagtaaatgtttaacagctcctgaggggaacagagtatctatgtgttttataatttttacatatatgtatcacataatttacaaaaagcaagaaaaaatataacactcttaatagtaaattctatatggccatgtgattttcacagaaccatttcagtgatttttgcagaatatttgtgtccatagccaacctacagctaaaattcaaacacgtttggcaaaatcagaccacaaataaatatctgattaatatccaatcagcaaagaagtcattcatggtactgaagtcccaacatgaatgttggttgatatttttacattaatgagcgagataaaagtgaagcaacaaaaatggatgttggaactaaactcgttcattaatgacagaagtgacttcttttgctgataatagctttcaagtactagaaaaatatttcctcaagtttttgtgttcacaaactaaggcacttttaagttcaatcttcattattaaaatttcttctactctgtcagtctagacaatcaacaaaacaaatcaagctctggtttgtcatgtttcccaatttctatagtataggtactccaccatggttgatttcaaactaccaaaataacatttctgaatgcagcgttaggaagggatacgctgcatcataccatcgtatggtatgttcttatacagaacagacagaaataactttaagaacatagataatagtaaaatggagtaaaataattaggcagtaaagtcttcagcatttatttttgttgttaaaatatttgattgtgagtttataaataatttggtttttaataatgactgtgattaacaaccaacttacaaaatctctgaaaatttaacagtcagtgcttgcaagctggtacaattgtttccggtgcactactgaattatcactcccctgcctaaaattccagactgcccattgcactgattccctgggaaataagtgaaaagagacaatgataattttcatttttgttgtggtgaagtgatagtgcaaaaattccataagctcctctaagttttccaaataaagcttagtgtttaaaaacgtttgaacacatgatcccatgtaaggcctacattacttcctgtgtgataggtggggtagatatcattatccttcctttacagattgaaaaacaaggctgagaaaaatcaaatgcctaccccaggctcattcaagtaagtaaatggcagaatagggtctaaaaaccaggtcttgtattgaaaattcaacaagaggatagagaaaatttaattgacaaatactgatctcaaaacaatttttttttcaatggtgacaaatgtcctttgtagcactttggagtttgatatgaagtatcttcttatcttgttaagggatccctataccaagaatgttttcatctcaaccccactatttctaagttagcttaaaaacaaaacaaaaccctgtgtgctctaataagaagatataagaaccaaaatggaaatgcaggttctcaaatgagctgaaagattccacatagcagcggggcagattgaaacactctttaccaaaggaacatgggagagaaaaggagattaaatcaagaaaggaagaaagctaatgacatatgaggagccacaaatgccacaaatgaaaaaacaaagtacgtaatacttgttgcaattattcagtgtgcttgctctaatgcctccaaacattaaaaacattgagttcctgcttatggcaacatttatctcatttatctgctgatagctgcctcatccttgaatcaggtattgcttaaactaagttctgccagcataaagaataaagtcaaccaggacacccattgggcatttcacgcatatgagcacaaattgtgatattttaggttgcttatgatgaaatcattgaaagcatcatgaaagacagcaaaacagcaggaaagctagtaataatttagcatttcccagtccaggcgggaatgttaattctaattacaacgaggaataccaaagtggagttcattatgattaagaacttgctgtactagtgtgaattgtttataataggcatgtctggcataaaatacaaatattgaagcagacagagatggctcattcaaagctcagctgggttcccttgaacctcttaccttataaagttaaataggaatagaagtattttccaaagtcaagatattattttaaagagacaaataatagctatgatagctgcaggaataattttttaaagtaagttctaaccaccaataaaagctgtttgtgtgggcttaacatgttcaaaatacacaatacacatgtacacaatacacgtatacatggttcccatttatatttaacatcacacatttaaagtgagagagtacagaaaaaaagaataaatggaaactgaagccatgacaaagaatcacggactataggaaaataagtcacaaagaagtatgcttatgtaagaggaaatatatgtgataaacaacaggagacatgggaatgaatgtggtgtcttatgtcctttctttaacagaatcgtgtaacagacactactcaatatcgatctcaactgatccagttctccagtctccctggaaaacaatggattgatgcccagggtgcgctgaacactggaaccatggtcacttctgcacttcacacgattctgctcccaccagttgagctaccaacagttcctggtgcttttgcttcccaaacatgtttatgccatttgttgcttattactgtacttacttaatttgattaaatattaagtaaaatgatgaaatgagtgtaaaaaattgttctataaaatctaaatggaaagatgccctatagccttccttgacttacagttgcgtcaagtaaggtggatgtaagacaattttaaaagactggtgtgggggcaggagtgaggaatcataaaaatttagaaatctgcacgaaaattattctaaaagtacacattgaacatccctaacttgaaaatctgaattttgaagtgctccaaaatccaaaactttttgagcattgttatgataccacaaatgaaaaatcctacatggaagtacttaccacaaactttgcttcatgccccaaattattttaaatattgtataaaattatcttcaggctataaggtgtatatgaaacaaaaaatgaatttcctatttagacttgggtcccatggccgagatatctcattataatgcaaatattccaaaatcagaaaaaaaaaaatccaaaatctaaaacactttcagtattaagcatttcaggtcatggatactgaatgtgtatctttaatttcttgttctactttgtttaaaaaaaagggggaaaatagtaattctacagatgaataataattgctaatgatgagcaaatacttcctatgacccaggaattcgtctaagcacttcacatatatcaaactggtttaatctttataaatcagtactattattatccccattttacagatgatggaaaaaggcacagagagttagcctgcccaaggttacattccttttagtggtggagactgtatttggcctttatagtctggcttttaactgctacactatatcaatgcattacaggtatagtttatacacacactaaagaagacatggaactccagtcagtgggctcataaaagctttagaccttcatcaaaagattagaaaataaatgttcaatcacaggttttaggtttcaaaagtttcaaaagtttaaagtttgcaagttatctttcttaaaattatttccttcttttaactaatttttaaattaaactccagttcaatcacatccactagaaggcttcactttctacaaaggggtaggtaaaggtgatgatcttaaataccatactgggagttgggatctgtgtagcactagaatcaagagttattgtatatacttgagaaggagcacagcctgatttagttgatgttttggaggggtaatctggcagtacagcttggattattttagtgggaatggagatgacaaaacatgaagagaatgggagaactcacttgggtaatatatcagtttctgaaatcaatgtatcaagtggtttggttattagtcaggcttaaggttttattggccttaggacatagtctctaagaccatatattatcttcattcattcatttaaccaacacccactgagcaccaactatgcactagtgatacaggggtgaacaaacagacacagtccctgcctttgcagaacttatgttctggtgggtgatacagagaaataacaaatgagggcacaaataatgaactatcattgtaatgtgctaacaaagtatgcagaatactataagaacatacaatcaagaatctaatctagtttattttaaaaaaaagtggggggagcactcagatgtttaaacacaaaacaataaaaatgaggatcttgagggttatctgtacactttttattaacccatttggccacaacaataacccagtaaaagtgattttacatctagttaactagttgactcaatgttattataaccctgtaatgtatttgttgggtgcctgctatgtagtgggctgtgttccaggagtgggacataaagctatgacaagatagatcaggtccttgccttgactgagtctgaatacatcaccttcatttccacctctgcttctaagacaatcaaataccttcccactcagatagggattcatcctatttcttgtagtaattataagttcccagggttacagattagtaaatgccatacctaaagacttaggatactgtgcataaaacactttcaatagtgtctgtcagacagcagatgcgcaataaatgttgactttcgttagaattgtgttattattataatgctaaatctcacgtcctttctggcacactggagttcatctcttcaattaaattccgtaagcacatattgtaagtagtctatcagaattgatatactacttcatgttaatgattgagatcagtgaggaaaaccactttaatattgtctaattcctctcttaatgcataggagccatgtgaacttagacaagcatcaacctctgtaagcctgttgtcctcatattgaaaaatcgaataacaatacctatctcatttaattgttgtcagcaaaagtgggcagcagaagagtggggatcaataaatgttagccacaaatcataactatttgtattactctgaaaaagaggggttaacttatagttcatgcatgcttccaaatgaatgtgaaagactaaagaatgagaatttttttgctatcaaattaaaaaattaacaggcacatttagattgctgaagagagaaattaggataagtttttttttttttttgctcaattaaaaacgttttcaatggcatatttaaaactacgtattcttccccattaagatctgcagagaaaaaaaaatgaagggagaataattgggaactcttgtgaaatcataaattatttaagcagagtacctaccactaaggatttgagcatgtatgagcgatgaggtggattcttagagcagagattcagcagtgagacaggctaatggcatggggagatgtgttctattagacaactgtattgtccccttaattatatacatatatatgtatataatatatatgtgtatacatatgtatacatacatgtatatataaatagaattcttaatcattttaagcagtgtacaaggataattattagcatgggctatttaactcacttttaaaacgtgtaaaacattattgtagggttgggtcttgatttgtttcccatgaaactgttggtagtttaggggccaaattaacgaaagacatctcattctagtgcttgaggctcagaaattggaaaaacgggcaactaggtcaagcagtgttctcatagcctcacagatgagcatccaaagcaagggcctccttctagttgacttgtgccaagggacaggagaagcggagtctgccttctgggtccagaagggggttttgttaacatggagttgctcagcgcccttcataaaaattcttctggctgagggttctacgttggcatacggttggttccctcttcttttccgaggtggcgagtatctcttcctttgccaagatggcggctccagaatcctctggaggcggcccccgtagatcgtctccggacaagaggcttgctgaaagcctacttctttcctttcacatcagacaatgcacagggaaccgtttacccttgagaaccaaggaaggacggcttaggctacccgcgatcgcgaacctttgccaagatggtggccgcggggacgggctggcgacactgtaccctaccaagatggcggcgggcggcttccgggacgcgcttccccaatcgtcttcaagatgtcagagcagggggagccgccgtcagtctgagcgcggcgggaggtgagagagtggctgtggccgagcgcccgagcaggattaggtggagctgcggcagcccccgcccgtgtcaggagctggcaagcgatgtcacctgtgggggcgcaaaagttacctccccaaaccctaaacccacacagcacaacctttcccagagtcacaaaaatcataatctgtgccgcacaaggtaggaggctcggtcccggcatcgtccaagccttcccgacgcggcgagctggggaagggagctggggcgggggcttcccgcacgggcacccctcgccccacggccctctcctttctcaggacggaccacgagttcccttccccttggactgagggggaagctcctaacaggaacatctgtagggagttgaacgctggcattttaaagctgcctgtattttgttttatttgtaggggcaggggtcctatgaacgtgatagggtgagcaacgcacagagtcgagggcagcaaatgtcaagattcgggggtggggcctgcaccgggaacttggacgcgggccctggccggggtggaagaagaggtcaggagtttcggaaggggggctatatttcgccagcaacttactatttcgcctgcaacttgcttttaagcctgccgccccctgctttccttaatcataataataaaaaaaaagtgcaaagaaatccagctcgctggaggttttgcatttggcgtgcaacttccttcgagtgtgagcacattgggcgggaggggtgggggttgaacttggcaggcggcgcctccttctgccgccgccgccgcctcgcagactcggggaagagggtgggggacggtcggggcgcgggggagggtgggttctgctttgcaacttctctcccagtgcgagagcgcggcggcggcagctgaagacccggccgcccagatgatgcggtggtgggggacctgccggcacgcgactccccccgggcccaaagtacgtatgcgccgacccccgctatcccgtcccttccctgaagcctccccagagggcgtgtcaggccgcccggccccgagcgcggccgagacgctgcggcaccgtttccgtgcaaccccgtagcccctttcgaagtgacacacttcacgcaactcggcccggcggcggcggcgcgggccactcacgcagctcagccgcgggaggcgccccggctcttgtggcccgcccgctgtcacccgcaggggcactggcggcgcttgccgccaaggggcagagcgagctcccgagtgggtctggagccgcggagctgggcgggggcgggaaggaggtagcgagaaaagaaactggagaaactcggtggccctcttaacgccgccccagagagaccaggtcggcccccgccgctgccgccgccaccctttttcctggggagttgggggcggggggcgaagcgcggcgcaccgggcggggcggccacgccaggggacgcgggcgtgcaggcgccgtcggggccggggtggcggggcccgcgcggagggcgtgggggcagggaccgcgggcgcccctgcagttgccaagcgtcaccaacaggttgcatcgttccccgcggccgccgcgcggcccctcgggcggggagcggccgggggtggagtgggagcgcgtgtgtgcgagtgtgtgcgcgccgtggcgccgcctccacccgctccccgctcggtcccgctcgctcgcccaggccgggctgccctttcgcgtgtccgcgctctcttccctccgccgccgcctcctccattttgcgagctcgtgtctgtgacgggagcccgagtcaccgcctgcccgtcggggacggattctgtgggtggaaggagacgccgcagccggagcggccgaagcagctgggaccgggacggggcacgcgcgcccggaacctcgacccgcggagcccggcgcggggcggagggctggcttgtcagctgggcaatgggagactttcttaaataggggctctccccccacccatggagaaaggggc

SEQ ID NO: 428 - DNA, 29085 bp, Homo sapiens
  source 1..29085: mol_type = genomic DNA
aacagcgatgctcaaaggcaacctccttcctgacattgcctggtaggacgcgacgtggtgtttgcccgcgcggaatgcggacgcaaggctgctcctaggtctcggggacgcgccatccccatttccgctcgcggaggcgtagggtccgggcgcgggaccccagtcgaccttgactggcggcgcgaccttgaggcctgcgttcgcctcagttgccccctctgtgcaatggggagacgcgcctcatcgcttgacaacggccgaagagccgccgcgcttccgtctcccgcgtgcgcgcgccatgctgcccacccccgttccgcactgaccctcccccgtgccccgcgtcccgtactgccgccccgccccgagtcccatgccgcagccaccgcgacggagcccgcaggcgggaacctgcctccgcgcgttagcgcgcacgcgcgcctcatgtgtcgtccccatcagcgccggcttccgtctataggccagatgcactgtcactctggcgaagtcgcagacccgattggccgggacggaggcgcgagaccgggttgcgggcggggccgaacgtggtataaaaggggcgggaggccaggctcgtgccgttttgcagacgccaccgccgaggaaaaccgtgtactattagccatggtcaaccccaccgtgttcttcgacattgccgtcgacggcgagcccttgggccgcgtctcctttgaggtcgggcgggcggcggcgtgcgggaatggggcccagaaagtgggccggggtcggggtgggtggtagcgccccaaaggcccgggcgcggggcgaccctgcttgaggggcgagcgcgggcgggctgcggcgccatttcctgacgaggggccattttgggaggtccgcgagtcgcggggaggaggccgggacggcggcggacaaaggcaggcggggcggctgcgaggccgttgggggagggggcccgcgtccgcccgcccgcctcatgtggccgcgccctgtcctgtccgacgcacgtgctcggcggccgcgctcaggtccgcgccttgagagtcgttgggctccgccctagcttggcctgggcgccgcagaccggagccagaagcacgctcgcgggggcttgcgaccgccttcctgggaagctgtcccctggcaggcatgggtgctttacatcctgagctgggaagctgtttgcttgagggtttttctcaaggatcgaggcgcggtgtgagcccgtccatgctcggtcctgtagatcccgggaggccatgttataaaaggagacttgctgggatgtgacgggttgccacttgaaatatcttccatttggataaagtaggaatatttatacatgtgccccaaacgtccctccgtgtcccccacccccaagcggaaatgtgaaaatgggccttgcctttgctggtgcccaaggaccgccttccactgcagtgacggcgctggcgggggaggcgctcttgagcccctcccgattgtccctctgcctagcaagcaagttgcgactggccacaaggcaggcctcttccgaccaaggtggattaccagtgattacctaattagttttgagagcgttaaatgagttcttaaagatcagttgtaattatagcatagtatctaaacttggcgcgtgtcttcaaagttaaatattgagtacgattccgttccagttaacatggatagaccttagggagtagcgaaataggatgttagtggttttattcctttaaatcacatctcaaaaggccaccaatggctagtttgggatcttattccgaaaatagattgatcctcatgcagtcttcgtgaggacagagcgatttccttgttgcctaccctgtccatagtgcctggcacataggcactgaaacactgcatgttaatccacaccccaccccacctatgagtgtagtcaaagctggtaagtgacaagggctttcgtggaaacttggcctgacctaatgttgggcatcaggttacccaaagagcttcagggaaatgagaaaggacttgcaggtcttgatgagaatggaggggtaactgccaatgagggctttggctttagcgaaagtctgaaagggaagccataggaacttaaacgtaccgactataaagctctgagaaaagctgatgttttagaaagaccatacattctaggtacaaatacctaaaaactaaaaaataagtacgttggccaggcgggcggatcacgaagtcaggagattgagaccgtcctggccaacatggtgaaaccccacctctattaaaaatacaaaaattagctgggcgtggtggcgcttgcctgtaatctcagctactctagaggctgaggcaggagaatcgcttgaaccccggaggcggaggctgcagtgagccgagatcgtgccactgcactccagcctggtgacagtgagactcttgtctcaaaaaaaaaaaagtacattgctataagagaagtgcacacggatactagtagttaattcagtcacatctgtgaaatagcttataaaatgctacttttaaacaagctgtttttatgaaagggcttgtaaatgtttatggtatttaagctacctctctagccataacgtattatacattcaagaaaggttcaaaaccagatatactagaaaccaatctttattttttaccccactactaggtaaggggcctggataccaagaagtgactgctcatctaatccataaagctatgttaacagattggaggtagtagcattttcattacaagtgactaaaagaacagctgtttacccctgatcgtgcagcagtgcttgctgttccttagaattttgccttgtaagttctagctcaagttggggggtggtgatagacatttaagaagccatatatcttttcagaagtaggtgtgatgtactaaaagtttgagacactttctagaagtctcactatttaagttatgactagtattggatttttggcatgtctttgggtttcatgtttcttaacccaactgcctgcagggccttatggctgtcaggagcagttcttgggaattaaagtaattactgaagaagtattctagtgagaaaatgaatttatgactcagaagcccctaaagacatgggtactaagcaacaaaataagcagatgttaattaactgtaattttctcttacagctgtttgcagacaaggtcccaaagacagcaggttggtccattttctaagtttaacaaagatgttccaattgtgacagtttgtgtgtgtgtgtgtatatatatatttttatgtatgtatatatgtgtttaatttttttttaaacagaaaattttcgtgctctgagcactggagagaaaggatttggttataagggttcctgctttcacagaattattccagggtttatgtgtcaggtacgaaatttactgaattttattttatttgggttgctcccttcatttgggattgagccagaatatttcaggatacacatatctgaactgttactctaccatttcggttctatttaacccttctattcagtttgaacttgggtttaaagtttgaaccttgcagatttggcacacttcatggttatgttgtcagaagtgacatttttcctatatgttgacagggtggtgacttcacacgccataatggcactggtggcaagtccatctatggggagaaatttgaagatgagaacttcatcctaaagcatacgggtcctggcatcttgtccatggcaaatgctggacccaacacaaatggttcccagtttttcatctgcactgccaagactgagtggtaagggtacaacatggcacactaaccacctgactaaatgaaaagttgccctggggggaacggaacaaacactacttttcttcaacctttgcttccacagactttttcatccctaagatactagaagaagagcatacataaacgacaaatatagccaatgtgatacagaatgtcagatactatgatagaaacttggcccttagctgggtggttgaattaggtgctacttttttgagatggagttttgctctgttgccaggttggagtgcagtggcacaatctgggctcactgcaacctctgcctcctgggttcaagcgattctcctgccttggcctcctgagtagctgagaatacagatgtgtgccagcatgcctggctaattttttgtatttttgtggagacggggtttcatcatgttggccaagctggtcttgaactcgtgacttaaggtgaaccacctgccttggccccccaaagtgctgggatttcaggcatgagccactgcgcccaaccaattaagtgctttttttttttttttcttttctcagactggatctcgctcttatctcccaggttggagtgcagtggtgccatctcagctcactgcaacctcctcccgggttcaagcaattcttctgcctcagcctctcaagtagctggaactacaggcatgcaccaccactcccagctaaattgtgtattattagtagagcgggatttaccatgttgtccaggctggtctcgaactcctgggctcaagtgatctgcctgccttgacccccccaaagtgctgggattacaggcatgagccactgtgcccacccaattaagtgctgcttttatgttactattaataacatgcggttggttgggttttttgtttctttggggtttttgttttgttttgtttgtttttgggggaggggggcgcaattcattctatatgtgtaactcttttttgagatggagtttcgctctgtcgcccaggctggagtgcagtggcgcgatctcggctcactgcaagctccgcctcccaggttcacgccattctcctgcctcagcctcccgagtagctgggactataggcacacgccaccatgcccggctaattttttgtatttttagtagagacagggtttcaccgtgttagccaggatggtctcgatctcctgacctcgtgatccgcccgccttggcctcccaaagtgctgggattacaggcgtgagccaccgcacccggcctatatgtgtaactctttaatggtaattggagaatcatgtttaatgacatttagtacaaaaggcttcagttaaaaaaaaaaaaaaaagctacctttctcgtcttggttcatgacacatggaggctgcttgtttgtggttgccagtcatagtgattgttcttccttttcaaggttggatggcaagcatgtggtgtttggcaaagtgaaagaaggcatgaatattgtggaggccatggagcgctttgggtccaggaatggcaagaccagcaagaagatcaccattgctgactgtggacaactcgaataagtttgacttgtgttttatcttaaccaccagatcattccttctgtagctcaggagagcacccctccaccccatttgctcgcagtatcctagaatctttgtgctctcgctgcagttccctttgggttccatgttttccttgttccctcccatgcctagctggattgcagagttaagtttatgattatgaaataaaaactaaataacaattgtcctcgtttgagttaagagtgttgatgtaggctttattttaagcagtaatgggttacttctgaaacatcacttgtttgcttaattctacacagtacttagattttttttactttccagtcccaggaagtgtcaatgtttgttgagtggaatattgaaaatgtaggcagcaactgggcatggtggctcactgtctgtaatgtattacctgaggcagaagaccacctgagggtaggagtcaagatcagcctgggcaacatagtgagacgctgtctctacaaaaaataattagcctggcctggtggtgcatgcctagtcctagctgatctggaggctgacgtgggaggattgcttgagcctagagtgagctattatcatgccactgtacagcctgggtgttcacagatcttgtgtctcaaaggtaggcagaggcaggaaaagcaaggagccagaattaagaggttgggtcagtctgcagtgagttcatgcatttagaggtgttcttcaagatgactaatgtcaaaaattgagacatctgttgcggttttttttttttttttttcccctggaatgcagtggcgtgatctcagctcactgcagcctccgcctcctgggttcaagtgattctagtgcctcagcctcctgagtagctgggataatgggcgtgtgccaccatgcccagctaatttttgtatttttagtatagatggggtttcatcattttgaccaggctggtctcaaactcttgacctcagctgatgcgcctgccttggcctcccaaactgctgagattacagatgtgagccaccgcaccctacctcattttctgtaacaaagctaagcttgaacactgttgatgttcttgagggaagcatattgggctttaggctgtaggtcaagtttatacatcttaattatggtggaattcctatgtagagtctaaaaagccaggtacttggtgctacagtcagtctccctgcagagggttaaggcgcagactacctgcagtgaggaggtactgcttgtagcatatagagcctctccctagctttggttatggaggctttgaggttttgcaaacctgaccaatttaagccataagatctggtcaaagggatacccttcccactaaggacttggtttctcaggaaattatatgtacagtgcttgctggcagttagatgtcaggacaatctaagctgagaaaaccccttctctgcccaccttaacagacctctagggttcttaacccagcaatcaagtttgcctatcctagaggtggcggatttgatcatttggtgtgttgggcaatttttgttttactgtctggttccttctgcgtgaattaccaccaccaccacttgtgcatctcagtcttgtgtgttgtctggttacgtattccctgggtgataccattcaatgtcttaatgtacttgtggctcagacctgagtgcaaggtggaaataaacatcaaacatcttttcattatccctagtatttcttattccattaattaacagaatagcctcaccacgttgtcattaactgcttttattcatccaagtatttaactttttttttcttttttatttgagacagtttggctcttgttgcccaggctggagtgcaatggcactatctccactcactgcatcctctgcctcccaggttcaaacgattctcctgtctcagcttccagagtagctgggattacaggtgtatgccaccacacccagctaattttttgtatttttagtagagtaggggtttaccatgttcatggccaggctggtctcaaacagacctcaggtaatccgcccgccttgggctcccaaagtgctaggatttcaggcgtgagccaccgcgtccagccccattccttttttttttttttttttaatttctccagtgcccagcgtgatccctgacatctggtattagagttcaatacttgggccgggcctcggtaatcccagcacttcgggaggccaaggcaggcagattacctgaggtcagtagtttgagaccagcctggccaacgtagagaaactccatctattaaatatgcaaaaattacatggtcatggtggtgcatttctgtaatcccagctatttgggaggctgaggcaggagaactgcttgaaaccagaaagcacaatgagccaagatcgtgccactgcactccagcctgggagacagaatatgagagactctgtcccaaaaaaaaaaaaggtccggctgtggtgtctcatacctgtaatcccggcacttcgggaggccaaggcctgaggaccttgagccaaggagtttgagaccagcctgggcaatatagggggaccctgactctacaaataagaaaataagctgggatgccaggtgtggtggctcactcctgtaatcccagcactttgggaggccgaggtggacggatcacctgaggtcaggagtttgagaccagcctggccaacctggtgaaacctcatctctactaaaaatacaaaaaaaaattagccaggcatagtggcaggcacctgtaatcctagctacttggtaggctgaggcaggagaatccttgaacctgggaggtggaggttgcggtgagctgagattgggccattgcactccagcctgggggacaagagtgagactttgtctcaaaaaagaaagctggatgtggatgcatatgcctgtggtcccagctactcaggtgtctgaggtgggaggatcccttgtgcctgggaggtcgagggtgcagtgagctgtggtagcactccagctgggtgacagagaaagacccagtatcaaaaaaaaaaagtcttgctatgttgtccaggttagtctgaaaaactggcctcggccgggcacggtgtctcacacttgaaatcccagcaccttcggagtctgaggtgagcgggtcacggggtcaggagatggagaccatcctggctaacacagtgaaaccctgtctctactaaaaatacaaaaagttagccgggcatggtggcaggtgcctgtagtcccagctacctgggaggctgagacaggagaatggtgtgaacctgggaggcagagcttgcagtgagccaagatcatgccactgcactccagcctgggtgacagagtgagactcttgtctcaaagaaaaaaacaaaaaactggcctcaagcaatcctcctgcctccatttcccaatgtgcttgggttacaggtgtgagccaccatgcccaaccactgggaagataattatgtgccaaagtagacaatttcctccctcaacagaccttttgaaaggaaggccgggccaggcatggtggctcatgcctgtaatcccagcactttgggaggccaaggcgggtggatcacctgaggtcaggagttagcaaccagcctgaccaacgtggtgaaactacgtctctactaaaaatacaaaaaattagcctgtaatcccagctactgcggacgtggacattgcagtgagccgagaccgcaccattgcactccagcctgggcaaaagagcaaaatgctgtctcaaaaaaaaaagaaaaaggaaagtgagtcagatgccaagctggtattgcggcatcagcttgtgtagtaagatttgacctggtcagaaaggtctcaaatggctaccctgagaaagaagtggagcttggaagaaaggtaaccaggaaaacccatcatttttctgctggttggaggctctcatggaaacccttaggaaacttacaagctgagaggcgggagtttgcctagaccacactgtgagtttgctgtatatatccacgccttacacagtgaataagaagatactcagggccgggcacagtggctcagacctgtaatcccagcactttgggaggctgaggcgggtggatcacctgagtccaggaattcgagaccagcctgaccaacatggtgaaactccgtctctactaaaaatacaaaaattagccaggcatggtggcatgcgcctgtaatcccagctacttaggaggcttgaggcaggagaatcgcttgaacctgggaggtggaagttgcagtgagccgaaattggccccattgcactccagcccggatgacagagactccgtctcaaacaaaaaaaaagatacttgccccagcgtggtggctcacgcctgtaatcctaacgctttggaaagctgaggcaggcagatcacctgagatcaggagtttgagaccaccctggacaacatggtgaaaccccgtctctactaaaaatacaaaaattagctgggcgtggtggcacgcccctgtaatcccagctacttgggaggcagaggcaccagaatcacttgaacccgggaggcagaggttgcagtgagcggagattgtgccactgcactccagacttgggtgacagagcaagactccagctcaaaaaaaaaaaccaaaaaactaaaaactctgcttctcagagttgtggggattagatatgaagtacttagaagagtggttagcacatggtacatgcatgaacagttctgttagtgtgtaaacacccagcagggatttgtctagcttttcaccagtgtatcccagtacctaggctaaagcttggttcagagaaggctcagaagaaatatcacagtaactgtgtgatagaccccttctgatccctttacaaatattctaggctgggcatggtggctcacgcccgtaatcccagcacccaggaggccaatgcaggcagatcgcttgaacccaggtgttcaagaccagcctgtgcaacatggtgaaactctgtctatattaaaaacagaaaaattacccaggcggccgggcatggtggctcatgcctgtaatcccagaactttgggaggccaaggcgggtgaatcacgaggtcaggagtgcgagaccagccttgccaacatgatgaaacccaatttatagaggtggggataagggaccatctttaagagttgcctaccacaagtctataaaatacagtttaaagaccagaaataaaaagaaccccagcatatctactagtatcccagaaatgccctttgcaagccctcttcagttgcacgctctttcctcttcagagggaaccatgattccaatttttttttttttttttgagatgaagttttgctcttgttgcccaggctggagtgcaatgatgcaatctcggctcaccgcaaccctccgcctcccaggttcaagcgattctcctgcctcagcctcccgagtagttgggattacaggcatgtgccaccatgcccggctaattttgtatttttagtagagactgggtttctccatgttggtcaggctggtctcgaactccctacctcaggtgatcctcctgcctcggcctccaaaagtgctgggattacaggcgtgctcagcccatgattccaatttttgtgttcatcaatctctagcacctgtgtccctaaaaacatattgagaaaaagtgagaagcaagcacaaacctaattgtgcaaagaaaggtcgaaattgccactattatgaggcaggctcccaggagaaggcaagttgagcaggctgggttagagtgtggcctcagggtctttgagaacacaagaactatttctgggaaagtcagccaatgcctttctccacctcagaaaatctgtaaaatctataatatctggttcacagtcagatgttcccccttgttcttataatgtgtttttatgtttattgctttttaaaattctttttcagtccaggtacggtggctcatgcctgtaatctcagcactttgggaggccgaggtgggcagatcacttgaggtcaggagttcgagaccaacctggccaacatggtgaaattccatctctactcaaaatacaaaattagccaggcatggtggtgcatgtctgtaatcccagctactcaggaggccgaggcaggaaaatcgcttgaacctgggagatgaaggctgcagtgagccaagatcgtaccattgcaccccagcctgggcaacagagcgagactctgtctcaaaataaataaataaataaaattctatttcagggttaataggtgcagcaaaccaccatggcacacatatacctatgtaacaaacccgcatgttctacacatgtattccatatttttattattttttttttgagatagagtttcgctcttgttacccaggctggagtgcaatggcacaatctcagctcattgcaacctccacctcctaggttcaagtgattctcctgccacagcctgccaagtagctgggaggcaccaccatgcccagctaatttttgtatttttagtagagatggggtttcactatgttgatcaggctgacctcgaactcctgacctcaggtgatctgcccacctcggcctcccaaagtgctgggattacaggtgtgagccaccatgcctggcctgttttttttttttttttttttttttttgaagaaataaaaaaaaattctatttcaatcctgctctttctatgaggatgtatttttaaaatcattcttattaaggtataatttacatacaattagaatgtcttttataactgttcctcctctctccaccattcccaggatctaatttagttttacacattacatttgactgttaggtgtctttggtttcttttactccagagcagtctttccaccttaaaaaacaaaacaaaaccaaaacctgtaatttctgcttactagcttttaaaaatttattgagattataatttacataccatgaaattaccttttttgtgtgtgtgtgagatggagtctgtctttgtcactcaggctggagtgcagtggccttgatcttggctcactgcaaccaccccctcctggattcaagtgattctcccacctcagcctcccaagtagctgggattacagacgcccacctaatttttgcatttttagtagagacggggtttcactatgttggccaagctggcctcaaactcatgacatcaggtgatccacccatcttggcctcccaaagtgctgggattacaggagtgagccactgcacctggccaaaattaccctttttaagagcacagttcaataattttcagttagttttagagcattccatcaccccagtacaaggccttgtttccatatgtggtcaatcttgcttcaactgcagtcccctcaccacctggcaactgcaaacatgccttctgtctctatagatttgttgtttctggacttttttttttttttttttttaagacagggtcttgctctgttacccaggctaaagtgcaatggcacgaacatcattcactaacaccttgacctcctgggctcaagtgatcctcctgcctcagcctcccaagtagctgggaccacagctatgtaccaccacgtctgggtaatttttaagttttttgtagagaagaggtctcatcacgttgcccaggctggtctcgatctctgggctcaagcagtcctcccacgtctgtctctcaaagtgctgggattacaggtgtgagccactgggcctggctggacttttacagtgaatcatacactgtgtggtctttgctccttcccactttgtttgtttgtttgtttagagatggagtcttgctctgtcactcaacctggagtgcagtggtgcaatataactcactgaagcctcaaactcctgaactcagtgcaggactggactcctggactttatttttttttactccatgtttttcttgtttatttgaatcaatggttctgtatgaatgcaattttaggaaatataaatattcatcttaggggactggctaaatctcagtctcttgagtagctgggattacaggtgcatggcgacattgtttcccttaagtgaaaatgattttttttttttttttgagacggagtcttgctctgtcacccaggctggagtgcggtggcgcgatctcggctcactgcaagctccgcctcccaggttcacgccattctcctgcctcagcctcccgagtagctgggactacaggcgcccgctaccaagcccggctaattttctgtattttcagtagagacggggtttcaccttgttagccaggatggtctcgatctcctgacctcgtgatccgcccgcctcggcctcccaaagtgctgagattacaggcgtgagccaccgcgcccggcctctttttttttttttttttttaagacagagtctcactctgtcacccaggctggagtgcaatgggcgatcttcactcactgcaacctccgcctcccaggttcaagtaattctccttccgcagcctcccaagtagctgggattagaggctgatgccaccacgcccagctaatttttgtatttttagtagagagggggtttcacgatgttgtccaggtcggtctcgaactcttgagttcaagtgatcctccaaactcggcctcccaaagtgctgggattacaggcgtgagccactgcgcccagccgatgttgactcttttaaaagttcaggacaggctgggcgcagtggctcacgcctgtaatcccagcactttgggaggctgaggcaggtggatcacaaggtcaggagatcgagaccaacctggccaacatggtgaaacactgtctctactaaaatacaaaaaattagccgggggtggtggcacgcacctgtagtcccagctactcaagaggctgaggcaggggaatcacttgaacctgggaggcagatgccactgcactccagcctggagacagagcgagactgtgtatcaaagaaaaaaaaaaagttcaggacagctgggcacggtggctcactcctgtaatcccagcactttgggaggccaaggcaggtagattgcttgagctcatgagttggagaccagcctgggcaacatagtgaaaccccatctttacaaaaaatacaaaaattagccaggtgtgagcctgtggtcacactggatgcgagcctgtggtcccagctactcaggtggctgaggtgggagaatcccttgagcctgagaggtggagtttgcagtgagacgtggagtttgcagtgagacgtgattgtgccactgcactccagcctgggtgatagagccagaccttgtctccaaaagaaataaaacagctgggtgcggtggctcacgcctgcaattccaggccgaggcaggtgaattatctgaggtcaggagttcaggaccagcctggccaacatggtgaaaccccatctctactaaaaaataaaaaattagccgggcgtggtggcacatgcctgtaatcccagctactcaggaggctgagacaggagaattgcttgaacctgggaggtggaggttgcagtgagctgagatcgtgccattgcactttaggctgggcgacaagagtaaaactccatctcaaaaataaataaataaataaaataaagaaacaaataaaacaaagagttcaggacattgactttgtggaatgtccattattctggagctaattgtttcctgtttttctcttttagctcctgtattttctgtaaattggaaattacactaggcctagaagcttaattggattcaaattcatcatatttagcaggaagatttcataggtgatactttgtgtacttaatcttgcctcacatcaggaggcacaaagtctcaggctgactcatcagtgaggctaaatttgaacttgcagttaaggtaatgcctgccagactgctccactggaaaggtatcttttcccttttctgaaaattaggtaatcttgaggggtgatattttgcctctgcataaagaccctctttccaagaagagagccttttcacctgattgttgtgttttggcattaattatatttgtctgaatcaattattcccttttgcagttgtaaagtacccttctgatccctccctcctcctgtcactatggacttatgtatttttattcaatatattaaataattgttttcccagttgccttatttgaatttacatccaaataggatccatatatctatagaagtttgagcagaggagtgacagcatttgcctaactttttttttttttttagatagggtcttgctctgttgccaaggctggaatgaactgatctcagctcactgcagcctcgacctcctggcctcaggcgattctcctatctcagcctcctggtagctggaactacaggcatgtgccacccaccacacctggctaatattaaaaaaaaatttttttgagacagagtcttgcttggttgtccaggctggagtgcactggtgttatctcagctcactgcaacctccgcttcccaggttcaagcgattgttgtgtctcaagcctcctaagtagctgggactataggagtgaaccaccacgcccgactagtttttgtatttttagtagaggcagggtttcaccatgtgggccaggctggtctcaaagtcctgaccgtaagtgatccgcctgccttagcctcccaaagtgctgggattacaggtgtgacccaccactcctggccaaaaaattcttttaaaattttttgtagagacaagctttcaccatgttgcccaggctggtctcagactcctgggctgaagcaatccgcctgccttggtctcccaaagtgctaggactacaggcatgagccaccgttcttcttctttttttttttttttttttttttttgagacagagtctcactctgtcatccaggctagagtgtagtggcgcaatctcggctcactgcagcctccacctcccgggttcaagtgattctcctaccttagcctcccgagtagctgggattacaggcgagcgccaccacacccagctaatttttgtatatttattggagacagggttttggcatgttggccaagctggtcttgaactcctgacctcaggtgattcacctgactcggcctcccaaagtgctgggattacaggtatgagccactgtgcccaacagagctaccttttttttcccccccgagacggagtcttgctgtgtcacccactctggagtacagtggcgtgatctcggctcactgcagcttccacctcccaggttcaagcaattctactgcctcagtctcccaactagctgggattacaggcgcccaccaccacgcccggctaattttttgtattttttagtagagacggggtttcgccatgttggccaggctggtcttgaactcctgacctcaggtgatctgccaacttcagcctcccaaagtgctgggattacagacatcagccaccgcgcccggcctaagccaccattcttaaaaaggtcactttgactgaagtctgttgaggatagactatgtggcggagtgaaatctggagactactgcatcatccaggagtgaggaaaggggcttgggccaggatagtaatgtcagtggtgaaaagtaaatctgctttaatgacaggattactttaaatgaaagaggaggatatgatggcttatgcctgtagtcctagctactcaggaagctgaggcaggaggattggttgagcccaggaggtcatggctgcagtgagccatgattgcaccactgcactccagcctggacaacagagcaagactgtctcaaaaaaaatacggcagggcgcagtgcttcacgcctgtaatcccagcactttgggaggccatggcaggcggatcacctgaggttgggagtttgagaccaccagcctgaccaacatggagaaaccccgtatctactaaaaatataaaattagccgggcatggtggcacatgcctgtaatcccagctactcgggaggctgaggcaggagaatcacttgaacctgggaggtggaggttgcagtgagccaagatcgcgccattgcactccagcctaggcaacaagagcgaaactccatctcaaaataaataaataaataaataaataaatatatatacacacacatatattaatataaaatataaataaatgcaagaggaaatgagattggttatctttagaaccttaaattctgaaatactattttttctccttcatgttttaaattttcttgctttgtttgaatcaatggttatgtacaaatgcaattttaggaaacagtataaatattcatcataggggactggctaaacaaattacagttctctattaatttattattttatattattttattttattttattttttgagatggagtctcactctgtctcccaggctggagtgcagtggtgtgatctcagctcactgcaacctccacctccccggttcaagcaattctcctacctcagcctcctgagtagctgagattacagatgcccgccaccatgcccagctaatttttgtaattttagtagagacggggtttcaccatgttggccaggctggtctcgaactcctgacctcaggtgatctgctcacctcagcctcccacaatgctgggataacaggcgtaagccaccgcgccccgcctattaatttataatagccttacagatccactgcttccttttactgccctgaactcaaattatgggtgtgactttcttacaacatttttaaagatcagtaaggtctaactagacaataaaggacaaaggaaagggaaatccctgatgatgaaataatatgtgtttcactctgtattattattattattattattattatttttgagagggagtttcactcttgttgcccaggctggagtgcaatagcgtgatcttggctcaccgcaacccccgcctcctgggttcaagcgattctcctgcctcagcttcccgagtagctgggattacaggcatgcgccaccacacccagctaattttgtatttttagtagagacggggtttctccatgttggtcagactggtctcgaactcctgatctcaggtgatctgcctgcctcagcctcccaaagtgctgggattacaggcgtgagccactgtgcctggcatgtttcactctgtaaatgcttgggtctctaagatcactggagagggtacagtgagaggtcgagtccatcctgctgtaactgcttgtagcaaggagtgcagtttaggtgtctttcagtatctcaggtgacaccagctgacttccagaagtgatgaacaactcaacaaaattccaaacaatgaaggtgaagttcatgctttggccaggcacagtggctcatgcccgtaatcacagcactctgggaggccaagatgggaggatcacttgaggccaggagttcaagaccagcctggtcaacatagggataccccatctccaaagaaaaaaatttataaaagtaaataagtaaaataaagttcattcttctctctgattacacagcagtttacaggcctggagaatgtcagggatgttaaaacttttaacaagcaaaactacaaccaaacccctttgtgtttatatgtaaaatagagttctagacttaggcaatgataaatgagttattcatgtacatgaacatctggctggacatttcagtcatgtggacagtgccatgcatgacaagatgtgcaacatctccccaaccactgttggaggcccacaaatcttcaaagtgcctcctggaggcactgctgtcctgctgaaaccaccaacatgacgagatagaagtaattgttaaaagaccagtgtaggctgggtgctgtggctcatgcctgtaatctcagcagtttgggaggccaaggtgggaggatcacttgagcctaggagttcgagaccagcctgggaaaccaagtgagatgttgtcgtaattttttttttttttttgagacgaagtcttgctctgtcgccaggctggagtgtagtggcgcattctcggctcactgcaacctccgcctcccgggttcaagcgattcttctgcctcagcctcccgagtagctgggactaaagaggcccgccaccaggcccggctaatgttgtatttttagtagagacgtgtttcaccatgttggccaggatggtctcgatctattgacctcgtgatctgcccgcctcagctcccaaagtgctgggattacaggcatggaccttgtctctattttttaaaaaaagaccaatgtgccaggcatggtggctcacacctgtagttccagcactttgggaggccaaggcaggcggaaactcttcatatgtaatgcaggtaaaaataagtcctctctagccacagtcattgagcctctacttggagacacccactgtgaaacatttcttcgctgtccttccaaggatattctatgcacatgcaagcatctctactaaaaatataaaaattagctgagtatggtggcgggcacctgtagtcccagctacttaggaggctggaggcaggagaattgcttgaacccaggaggcggaggttgcagtgagccgagatcgtgccactgcactccagcccaggcgacagagcgagactccgcctcaaaaaaaaaaaaaaaaaaaaagacagacgtaaaaaaaaagaaagaaagtagataaaggccaatgtagtacatcctcaaaatagcctcagacagacgtagacatagattttgtaaagttagatttagaaaaacaaagaacagtagaatgcaatataacatatgccactgtttttgtaaaaagtaaaattaaatgtatctttatgcttgcatgtgactataatatccttgggaggacagagaagaaatgtttcacagtgggtgtctccaagtagaggctcaaggactgtggccagaggacttatttttacctgcattacatatgaaaaatttcaaaaacatacattttaaaataaatcagtagtatgtggctcactccaagtgcttaaacaaatatattgttcaaaaattacttttttttttttttctgagacagagttttgctcttgtctcacaggctgaagtacaatggcactatctcagctcactacaacctctgcctcctgggttcaagcgattctcctgcctcagccttctgaatagctgggattacaggcacccgccaccacccccagctaatttttgtatttttagtagagacggcgttgagtataggtgcacattaccacacctggctaatttttgtatttttatttatttatttatttatttattatttttatttttatttttttcgagatggagttttgccctgtcgcccaggctggagtgcagtggcgcaatctttgctcactgcaaccttcgcctcccaagttcaggcgattctcctgcctcagcctcctgagtagctgggattacaggcgtgagccacctcgcctggctatttatttatttttgatacggagtcgtgctctgttgctcaggctagagtgcaatggcacaatctgggctcactgcaacctgcgcctcctgggttcaagtgattctcctgcctcagcctcctgagtagctgggattacaggtgcccgccaccacacccagctaatttttttgtatttttagcaaagacagggtttcaccacgttggcccaggctgatcttgaactcctgacctcaggtgatccacctgccttggcctcccaaagtgctgggattacaggtatgaggcaccatgccaggccataattttcgtatttttagtagagatgaggggtttactatgttggccaggctggtcttgaactcctggtcacaagtgatcctcccacctcggcctcccaaagtgccaggattacaggtgtgagcctccacatccagcccattcattattacttttattacttattaggcaattttccaaaacaaaagctagaaatcaggccaggcacagtggctcatgcctgtaatcccagcacttagtgaggctgaggcaggaggatcacttgaggtcaggagttcaagaccagcctggccaacatggtgaaaccccatctccactaaaaatacaaaattagccaggtgtagtggtgggcgcctgtaatcccagctactcaggaggctgaggcaggagaatcacttgaacctgggaggcagaggttgcagtgagccgagatcgtgcgactgccttccagcttgggcgacagagcaagactccatctcaaaaaaaaaaagaaaaaagaaagaaaaagatcaggcgaggtggctcacccctgtaatcccagcactttgggaggctgaggcgggaggatcacctgaggtagggggttcgaaaccagcctgaccaacatggagaaactccatctctactaaaaatacaaaattaggcaggcgtagtggcgcatgcctataatcccagctagtctggaggctgaggcaggagaatcgcttgatcccaggaggcggaggttgcggtgagccaagatcaagccattgcactccagcctgggcaacaagagactctgtctcaaaaaaaaaaaaaaaattagtcaggtgtagtggtgcatgcctgtagtcccagctattcaggaggctggcccaggagatggaggttgcagtgagccaagattgttccactgccctccaacctgggcaacagagtgagattctgtcaaaaaaaaaaaaaaaaaaaaaaaagaaagcaatttgtgttaatccactctttttaaatctgcttttcatagaaaaaacttttttcatatttatttcataatagatttacataattgctaactgaattgcatatttaaaatagatatttttcacatatgcagatctgggaagaaatagaatggattcttttttttttttttgagacggagtctcgctctgtcacccaggctggagtgcagtggcgtgatctcggctctgttgcaagctccacctcccaggttcacaccattctcctgcctcagcctcctgagcagctgggactgcaggcgcccgccaccacgcctggctgatttttttgtatctttttagtagagacggggtttcactgtgttagccaggctggtctcgaactctgacctcaggtgatctgcccacctcaacctcccgaagtgctgggattacagacgtgagccaccaggcccgtaatcccagcactttgggaggctgagacaggcagatcacatgaggccaggagtttgagaccagcctggccaacgtggtgaaaccctgtctctactaaaaattcaaaaattagctgggcgttgtggcacgtgcctgtaatcccaactactcgggaggctgtcatgagaatcacttgagcccgggaggtggaggttgcagtgagccgagatcgtgttactgcactccagcctgggtgacagagcaagactctgtctcaaaaaacaaactggccgggcactgtggctcacacatgtaatcctagtactttgggaggccgaggtcaggagtttgagaccagcttggccaacatagtgaaaccccgtatctactaaaaatacaaaattagccagttgtggtggtgggcgcctctagtcccagctacttgggaggctgaggcaggagaatcacttgaacctgggagacagagattgcagtgagctgagaccgcaccattgcaatccagtctgggcaacaagagcaaaactccgtctcaaaaacaaacaaacaaacccgcccaccctgcccgcaaaaaaaaaaaaaaaaaaaaaaaaaaagactgttgttcagccagatgcttaatttcctgaatttcagtatttttggggaatactttaggcaaacagtaactaacatatatacatatatccctaaaagttgtggacatttaagctttttcaaaatttctaaccctagctacaaccagtcaacccccagcactagctgaagctgcagtgggaggagacatccagaggtgggagatggtgaataccttgggcccaacttgggctccaggggcctggttttaggtcagtggcctccctggagatttcgacaccctctgggttgtagtgctgcctccagctcgttctccactctgagatgagctctggtcagactggctttgagtccacttttatcattaccacctggggagccttggggcagtgatttatgctaagtctgtttccttatctataaaaggggtatagttacagtatttacttcctctggtagtgcctaattttggtacaaattgagtatccctaattaaaaatccaaaattcaaaatccaaaacttttagagtgctgacaagatgccacaagtggagaatgccatacctgacctcatgtgatgggttgtagtcaaaatgcaatcaaaactttgttttatgtacaacattttaaaaaaatattgtataagccgggcgtggtggctcaggcctgtaatcccagctctttgggaggccaaggtgggtggatcacgaggtcaagagattgagaccatcctggctaacacagtgaaaccctgtctctattaaaaatacaaaaaattagctgggcgtggtggtgggcgcgggggcgggtgcctgtagtcccagctacttgggaggctgaggcaggagaatggcgtgaacccgggaggcggaccttgcagtgagccgagatcgtgctactgcactccagcctgggcgacagagcaagactccatctcaaaaaaaaaaaaaaaaaaaaaaatatatatatatatatatatatatagtataaaattatcctcaggatacatgtataaggtatgtgaaacataaatgaattttgtgtttagactggggtcacatccctaagatagctcataatgtatatgcaaatatttcaaaatccaaaaaaaaatcacaaattcaataagatggtcccaagaatttcagagaagggatactcaacctgcaatttttttttttttttttttttttttgagaaggagtctcgctctgtcgcccaggctggagtgcagtggcgcaatcttggctccctgcaacctccgcctcatgggttcaagcaattctcctgcctcagcctcccgagtagctgggactacaggtgtgcaccaccgtgcccagctaatttttgtatttttaggagagatggggttttgctatgttggccaggctggtctcgaactcctgacctcaagtgatcctcctgcctcagcctcccaaagtgctgggattacaggcatgagtcagcttgcctggactgtatctttcatttatgcaatttctaattatttttaaaatccagctgctctttttttaatggtggtttgccttcttgtatggttttttttgtttttgtttttgtttttgagacagggtctcattcttttgcccaggctggagtgcagtggtgtgatcatgactcactgtgccttgacctccctggttcaagcagtctttccacctcagcctcccaagtagcttggctaattttttattttatcttttgtagagtcagggtctccctgtgttgcccatgctgttgttgaattcccgagttcaagtcctccctcctaggcctctcaaagtttgtactttttttaaaaggtgtttccattaaagtcccgtgtgtcctgggacacataaacttttttttttttcgaaatggagtctcactctgtcacccaggctggagtgcagtggcgcaatctcagctcactgcaagctccgcctcccggattcacgccattctcctgcctcagcctcccgagtagctgggactacaggtgcctgccaccatgcccagctattttttttgtatttttagtagagatggggtttcaccatgttagccaggatggtctcgatctcctgaccttgtgatctgcccgccttggcctcctaaagtgctggaattataggtgtgagccactgtgcccggccccacataaacatctttacggcatggttctgagtctgcctagttcacttcctgcaggtctgttgcttgctgcccagtttttgtattcattgatctgcggggcagtgacatggttctcagaatgggggctctatttttgcacctgtgactctgggcagatggcaacttccttgatttcctgtgagagtgtttgtgtcatttatctaggtcaatttcaaggacataaagtcttttaattttttttgagacagagtctcactgtgttgtccaggctagagtgcagtggtacaatcacagctcactgaagcctccatctcccaggctcaagtgaacctcccacctcagcctcctaagtagctgggactacaggcacatgccaccacgcttgactaatatttgattttttgtagagacagggcctcactatgttgcctaggctggtcttgaactcctggacacaagtgatcctccaccttggcctcctgatgtgttgggattacaaagtcttttctagtcccatagtcagggagtcgagcctagccagccccctttcctcaatgggccttgagtcctcctcagtccccactgcaccctctggctgtggttccttagtacgattcaccccgacgcttttttcctttcttactctggtgataattttgtgatctttttttccagtgtgtctctatgcatggagtaagaaagaaaccatcctacaatagcaccaaatccagcatggatgggtaagaagactgaccaccaggtgttctggagtagccagctgcaatgtagaaagggtggaacaatgacctcataatgatgcagcagtgaccttgtagaaaagtggataggctgggggcagtggctcacacttataatcccagcactttgggaggctgaggcaggtggatcacttgagcccaggggttcgagaccagcctggccaacgtggtgaaactccatctctactaaaaatacacaaattagccgggcgtggtggcatgtgcttgtagtcccagctacttgagaggctgagacacgagaatcacttgaacctgggaggtggaggttgcagtgagcctagattgcgccactgcactccagcctgggcaagagagctagactccgtctcaaaaaaaacaaaacaaacaaaacaaaaacaaaaacaaaaacaaaacaaggccaggggtagtggctcacgcctgtaatcccagcactttgggaggccgaggtgggtggatcacgaggtccggagttcaagaccagcctgaccaatatggtgaaaccccatctctactaaaaatacaaaaattagccgggcgtggtggcaggtgcctgtaatcccagctactcaggaggctgaggcaggagaatcgcttgaacctgggtggcagaggttgcagtgagccgagattgcaccactgcactccagcctgggtgacagagtgagactgcctcaaaaaaaaaaaaaaaaaaaaaaaaagggtacatgtgattgctcatctctggactgtactggagaaaacaggaagttttgttttcttttcttcctgacgaaggaaggatgaaggtatcagaagacaggaacaaactgggatttatcccaagaacaacttacttgtgaattttaaagggctcccattctcctctggcaagcggcaatttagactatgccacaattctgaggacttgctcttgggccaaggcctcagggctcagggtcctctcaaagccttgacccgccctggggttgtaactctccttggtatggaaaaatggttcaaatgctgttgctttcaagaggttctttttctttctcctcagctgtgttggtgcaggactttcacatgtctttggagtagaataagatgtgccaatccagactcaaccccatctcatcaagatccagtgatcttcgttttccgattgtctagcccaagctctcttcctccccagactcatcctccaccctgctactggacttgtctttgtactctcaaagcagtgtgaggagattcatcaaccggtggtgtggacatgtgaacagcgtgaggcagagagtaagcatcaccctacaaaacctaaccccctatagagtggcattccctttcagtcagtctctactagctactgatcagaggagggaatttgcccctcagcaacttgacatgccacagttctcattctcttctggaatgcctgcctgtctgtgctccctccctctctcaatctctccttccctccacttctcgtttcttcccctctgtctcctccctcccctccttcttcttccctccttctctcctccacctccctccctttttctctacttccctcccttcccttagctgggtgtccccatctccaaggctctcactttcacactcccaggacactcccagccactgagtggaaatctccgcctttaaactctgaggtgtttatatttgggtactttcgaacacttaaaaacattttttttcccttagaacaccttctaaaagaaccttaaaattaaaaaaaattttttttggtggggagatgagggtctcactatgttgcccaggctggtgttgatctcctgggctcaagggttcctcctgcttcagcttcctaagtagctaggattacaggcatgagccaccacatccagcttttaaaaaaatcttaatagtttttacttgaaaaaacaatctgtggccaggcacagtggctcatggctgtaatcccaatattttgggatgccaaggcgggtggatcacctgaggtcaggagtatgagaccagcctggccaacatggcaaaacactgtctctactaaaaatacaaacaaaattagctgggtatggtggtgtgtgcctgtaataccagctactcaagaggctgaggcaggagaatcgcccaaacctgggaaacagagattgcagtgagctggatcgcgccactgctctccagcctgggcaacaagagcgaaaactcaaaaaaaaaaagaaaaaaatctgtggacaatgggaaggggccagtaccacacatctggcgccctgtcatacaacaatatgcggccttgtgcctggaatccgtctatatgcccatgtctccttccttcacttaggttataagcttcttgagggtggcagccagacagtagcagtttgtgtgcaaagcccctgcagtggcatatggaagactttcaatacatcaggaccagaggatgagctggaaatgaaatcacactcactggtgggagaaaaccaaacttgatgacagaggaccagtaaaggaagcagcttgagtatgtgtcctcagatgcagacacaaggccttgccttcctggatgagacaggcactgactggagcagggtttgccagactcaaagggccacattttagggacagtctaaaatgtggtatatggacagtctggcagtggtatgtagaatgggttaaaactggaagactgggctgggtatggtggtgcatgcctgtaattccagtactttgggaggctgaggcaggaggattgcttgagcccaggagttcaagaccagcctggacaacacaatgagactttgtctctaaaaaaacaaacaaaactgggtaattaggaggtgactacaagagcatagggagctagtggaaaatgaaaggatgtgtgtaaatctgaagaaaaggtcagaactgaaggtcagaatgtgtgctctgcaatgtgtgaatacagtatgaatgtgctccaggaagaatatctgaaacagattatcatgagtttccagaagtatgtggctgtactcagagttggggaagaagatagcaggaagtgggcagaggcagtaaaagcggaatggggattgag

SEQ ID NO: 429 - protein, 119 aa, Homo sapiens
MSRSVALAVLALLSLSGLEAIQRTPKIQVYSRHPAENGKSNFLNCYVSGFHPSDIEVDLLKNGERIEKVEHSDLSFSKDWSFYLLYYTEFTPTEKDEYACRVNHVTLSQPKIVKWDRDM

SEQ ID NO: 430 - DNA, 9199 bp, Homo sapiens
  source 1..9199: mol_type = genomic DNA
catgtcataaatggtaagtccaagaaaaatacaggtattcccccccaaagaaaactgtaaaatcgacttttttctatctgtactgttttttattggtttttaaattggttttccaagtgagtaaatcagaatctatctgtaatggattttaaatttagtgtttctctgtgatgtagtaaacaagaaactagaggcaaaaatagccctgtcccttgctaaacttctaaggcacttttctagtacaactcaacactaacatttcaggcctttagtgccttatatgagtttttaaaagggggaaaagggagggagcaagagtgtcttaactcatacatttaggcataacaattattctcatattttagttattgagagggctggtagaaaaactaggtaaataatattaataattatagcgcttattaaacactacagaacacttactatgtaccaggcattgtgggaggctctctcttgtgcattatctcatttcattaggtccatggagagtattgcattttcttagtttaggcatggcctccacaataaagattatcaaaagcctaaaaatatgtaaaagaaacctagaagttatttgttgtgctccttggggaagctaggcaaatcctttcaactgaaaaccatggtgacttccaagatctctgcccctccccatcgccatggtccacttcctcttctcactgttcctcttagaaaagatctgtggactccaccaccacgaaatggcggcaccttatttatggtcactttagagggtaggttttcttaatgggtctgcctgtcatgtttaacgtccttggctgggtccaaggcagatgcagtccaaactctcactaaaattgccgagccctttgtcttccagtgtctaaaatattaatgtcaatggaatcaggccagagtttgaattctagtctcttagcctttgtttcccctgtccataaaatgaatgggggtaattctttcctcctacagtttatttatatattcactaattcattcattcatccatccattcgttcattcggtttactgagtacctactatgtgccagcccctgttctagggtggaaactaagagaatgatgtacctagagggcgctggaagctctaaagccctagcagttactgcttttactattagtggtcgtttttttctcccccccgccccccgacaaatcaacagaacaaagaaaattacctaaacagcaaggacatagggaggaacttcttggcacagaactttccaaacactttttcctgaagggatacaagaagcaagaaaggtactctttcactaggaccttctctgagctgtcctcaggatgcttttgggactatttttcttacccagagaatggagaaaccctgcagggaattcccaagctgtagttataaacagaagttctccttctgctaggtagcattcaaagatcttaatcttctgggtttccgttttctcgaatgaaaaatgcaggtccgagcagttaactggctggggcaccattagcaagtcacttagcatctctggggccagtctgcaaagcgagggggcagccttaatgtgcctccagcctgaagtcctagaatgagcgcccggtgtcccaagctggggcgcgcaccccagatcggagggcgccgatgtacagacagcaaactcacccagtctagtgcatgccttcttaaacatcacgagactctaagaaaaggaaactgaaaacgggaaagtccctctctctaacctggcactgcgtcgctggcttggagacaggtgacggtccctgcgggccttgtcctgattggctgggcacgcgtttaatataagtggaggcgtcgcgctggcgggcattcctgaagctgacagcattcgggccgagatgtctcgctccgtggccttagctgtgctcgcgctactctctctttctggcctggaggctatccagcgtgagtctctcctaccctcccgctctggtccttcctctcccgctctgcaccctctgtggccctcgctgtgctctctcgctccgtgacttcccttctccaagttctccttggtggcccgccgtggggctagtccagggctggatctcggggaagcggcggggtggcctgggagtggggaagggggtgcgcacccgggacgcgcgctacttgcccctttcggcggggagcaggggagacctttggcctacggcgacgggagggtcgggacaaagtttagggcgtcgataagcgtcagagcgccgaggttgggggagggtttctcttccgctctttcgcggggcctctggctcccccagcgcagctggagtgggggacgggtaggctcgtcccaaaggcgcggcgctgaggtttgtgaacgcgtggaggggcgcttggggtctgggggaggcgtcgcccgggtaagcctgtctgctgcggctctgcttcccttagactggagagctgtggacttcgtctaggcgcccgctaagttcgcatgtcctagcacctctgggtctatgtggggccacaccgtggggaggaaacagcacgcgacgtttgtagaatgcttggctgtgatacaaagcggtttcgaataattaacttatttgttcccatcacatgtcacttttaaaaaattataagaactacccgttattgacatctttctgtgtgccaaggactttatgtgctttgcgtcatttaattttgaaaacagttatcttccgccatagataactactatggttatcttctgcctctcacagatgaagaaactaaggcaccgagattttaagaaacttaattacacaggggataaatggcagcaatcgagattgaagtcaagcctaaccagggcttttgcgggagcgcatgccttttggctgtaattcgtgcatttttttttaagaaaaacgcctgccttctgcgtgagattctccagagcaaactgggcggcatgggccctgtggtcttttcgtacagagggcttcctctttggctctttgcctggttgtttccaagatgtactgtgcctcttactttcggttttgaaaacatgagggggttgggcgtggtagcttacgcctgtaatcccagcacttagggaggccgaggcgggaggatggcttgaggtccgtagttgagaccagcctggccaacatggtgaagcctggtctctacaaaaaataataacaaaaattagccgggtgtggtggctcgtgcctgtggtcccagctgctccggtggctgaggcgggaggatctcttgagcttaggcttttgagctatcatggcgccagtgcactccagcgtgggcaacagagcgagaccctgtctctcaaaaaagaaaaaaaaaaaaaaagaaagagaaaagaaaagaaagaaagaagtgaaggtttgtcagtcaggggagctgtaaaaccattaataaagataatccaagatggttaccaagactgttgaggacgccagagatcttgagcactttctaagtacctggcaatacactaagcgcgctcaccttttcctctggcaaaacatgatcgaaagcagaatgttttgatcatgagaaaattgcatttaatttgaatacaatttatttacaacataaaggataatgtatatatcaccaccattactggtatttgctggttatgttagatgtcattttaaaaaataacaatctgatatttaaaaaaaaatcttattttgaaaatttccaaagtaatacatgccatgcatagaccatttctggaagataccacaagaaacatgtaatgatgattgcctctgaaggtctattttcctcctctgacctgtgtgtgggttttgtttttgttttactgtgggcataaattaatttttcagttaagttttggaagcttaaataactctccaaaagtcataaagccagtaactggttgagcccaaattcaaacccagcctgtctgatacttgtcctcttcttagaaaagattacagtgatgctctcacaaaatcttgccgccttccctcaaacagagagttccaggcaggatgaatctgtgctctgatccctgaggcatttaatatgttcttattattagaagctcagatgcaaagagctctcttagcttttaatgttatgaaaaaaatcaggtcttcattagattccccaatccacctcttgatggggctagtagcctttccttaatgatagggtgtttctagagagatatatctggtcaaggtggcctggtactcctccttctccccacagcctcccagacaaggaggagtagctgccttttagtgatcatgtaccctgaatataagtgtatttaaaagaattttatacacatatatttagtgtcaatctgtatatttagtagcactaacacttctcttcattttcaatgaaaaatatagagtttataatattttcttcccacttccccatggatggtctagtcatgcctctcattttggaaagtactgtttctgaaacattaggcaatatattcccaacctggctagtttacagcaatcacctgtggatgctaattaaaacgcaaatcccactgtcacatgcattactccatttgatcataatggaaagtatgttctgtcccatttgccatagtcctcacctatccctgttgtattttatcgggtccaactcaaccatttaaggtatttgccagctcttgtatgcatttaggttttgtttctttgttttttagctcatgaaattaggtacaaagtcagagaggggtctggcatataaaacctcagcagaaataaagaggttttgttgtttggtaagaacataccttgggttggttgggcacggtggctcgtgcctgtaatcccaacactttgggaggccaaggcaggctgatcacttgaagttgggagttcaagaccagcctggccaacatggtgaaatcccgtctctactgaaaatacaaaaattaaccaggcatggtggtgtgtgcctgtagtcccaggaatcacttgaacccaggaggcggaggttgcagtgagctgagatctcaccactgcacactgcactccagcctgggcaatggaatgagattccatcccaaaaaataaaaaaataaaaaaataaagaacataccttgggttgatccacttaggaacctcagataataacatctgccacgtatagagcaattgctatgtcccaggcactctactagacacttcatacagtttagaaaatcagatgggtgtagatcaaggcaggagcaggaaccaaaaagaaaggcataaacataagaaaaaaaatggaaggggtggaaacagagtacaataacatgagtaatttgatgggggctattatgaactgagaaatgaactttgaaaagtatcttggggccaaatcatgtagactcttgagtgatgtgttaaggaatgctatgagtgctgagagggcatcagaagtccttgagagcctccagagaaaggctcttaaaaatgcagcgcaatctccagtgacagaagatactgctagaaatctgctagaaaaaaaacaaaaaaggcatgtatagaggaattatgagggaaagataccaagtcacggtttattcttcaaaatggaggtggcttgttgggaaggtggaagctcatttggccagagtggaaatggaattgggagaaatcgatgaccaaatgtaaacacttggtgcctgatatagcttgacaccaagttagccccaagtgaaataccctggcaatattaatgtgtcttttcccgatattcctcaggtactccaaagattcaggtttactcacgtcatccagcagagaatggaaagtcaaatttcctgaattgctatgtgtctgggtttcatccatccgacattgaagttgacttactgaagaatggagagagaattgaaaaagtggagcattcagacttgtctttcagcaaggactggtctttctatctcttgtactacactgaattcacccccactgaaaaagatgagtatgcctgccgtgtgaaccatgtgactttgtcacagcccaagatagttaagtggggtaagtcttacattcttttgtaagctgctgaaagttgtgtatgagtagtcatatcataaagctgctttgatataaaaaaggtctatggccatactaccctgaatgagtcccatcccatctgatataaacaatctgcatattgggattgtcagggaatgttcttaaagatcagattagtggcacctgctgagatactgatgcacagcatggtttctgaaccagtagtttccctgcagttgagcagggagcagcagcagcacttgcacaaatacatatacactcttaacacttcttacctactggcttcctctagcttttgtggcagcttcaggtatatttagcactgaacgaacatctcaagaaggtataggcctttgtttgtaagtcctgctgtcctagcatcctataatcctggacttctccagtactttctggctggattggtatctgaggctagtaggaagggcttgttcctgctgggtagctctaaacaatgtattcatgggtaggaacagcagcctattctgccagccttatttctaaccattttagacatttgttagtacatggtattttaaaagtaaaacttaatgtcttccttttttttctccactgtctttttcatagatcgagacatgtaagcagcatcatggaggtaagtttttgaccttgagaaaatgtttttgtttcactgtcctgaggactatttatagacagctctaacatgataaccctcactatgtggagaacattgacagagtaacattttagcagggaaagaagaatcctacagggtcatgttcccttctcctgtggagtggcatgaagaaggtgtatggccccaggtatggccatattactgaccctctacagagagggcaaaggaactgccagtatggtattgcaggataaaggcaggtggttacccacattacctgcaaggctttgatctttcttctgccatttccacattggacatctctgctgaggagagaaaatgaaccactcttttcctttgtataatgttgttttattcttcagacagaagagaggagttatacagctctgcagacatcccattcctgtatggggactgtgtttgcctcttagaggttcccaggccactagaggagataaagggaaacagattgttataacttgatataatgatactataatagatgtaactacaaggagctccagaagcaagagagagggaggaacttggacttctctgcatctttagttggagtccaaaggcttttcaatgaaattctactgcccagggtacattgatgctgaaaccccattcaaatctcctgttatattctagaacagggaattgatttgggagagcatcaggaaggtggatgatctgcccagtcacactgttagtaaattgtagagccaggacctgaactctaatatagtcatgtgttacttaatgacggggacatgttctgagaaatgcttacacaaacctaggtgttgtagcctactacacgcataggctacatggtatagcctattgctcctagactacaaacctgtacagcctgttactgtactgaatactgtgggcagttgtaacacaatggtaagtatttgtgtatctaaacatagaagttgcagtaaaaatatgctattttaatcttatgagaccactgtcatatatacagtccatcattgaccaaaacatcatatcagcattttttcttctaagattttgggagcaccaaagggatacactaacaggatatactctttataatgggtttggagaactgtctgcagctacttcttttaaaaaggtgatctacacagtagaaattagacaagtttggtaatgagatctgcaatccaaataaaataaattcattgctaacctttttcttttcttttcaggtttgaagatgccgcatttggattggatgaattccaaattctgcttgcttgctttttaatattgatatgcttatacacttacactttatgcacaaaatgtagggttataataatgttaacatggacatgatcttctttataattctactttgagtgctgtctccatgtttgatgtatctgagcaggttgctccacaggtagctctaggagggctggcaacttagaggtggggagcagagaattctcttatccaacatcaacatcttggtcagatttgaactcttcaatctcttgcactcaaagcttgttaagatagttaagcgtgcataagttaacttccaatttacatactctgcttagaatttgggggaaaatttagaaatataattgacaggattattggaaatttgttataatgaatgaaacattttgtcatataagattcatatttacttcttatacatttgataaagtaaggcatggttgtggttaatctggtttatttttgttccacaagttaaataaatcataaaacttgatgtgttatctcttatatctcactcccactattacccctttattttcaaacagggaaacagtcttcaagttccacttggtaaaaaatgtgaaccccttgtatatagagtttggctcacagtgtaaagggcctcagtgattcacattttccagattaggaatctgatgctcaaagaagttaaatggcatagttggggtgacacagctgtctagtgggaggccagccttctatattttagccagcgttctttcctgcgggccaggtcatgaggagtatgcagactctaagagggagcaaaagtatctgaaggatttaatattttagcaaggaatagatatacaatcatcccttggtctccctgggggattggtttcaggaccccttcttggacaccaaatctatggatatttaagtcccttctataaaatggtatagtatttgcatataacctatccacatcctcctgtatactttaaatcatttctagattacttgtaatacctaatacaatgtaaatgctatgcaaatagttgttattgtttaaggaataatgacaagaaaaaaaagtctgtacatgctcagtaaagacacaaccatccctttttttccccagtgtttttgatccatggtttgctgaatccacagatgtggagcccctggatacggaaggcccgctgtactttgaatgacaaataacagatttaaa

SEQ ID NO: 431 - DNA, 8694 bp, Homo sapiens
  source 1..8694: mol_type = genomic DNA
tacctagagggcgctggaagctctaaagccctagcagttactgcttttactattagtggtcgtttttttctcccccccgccccccgacaaatcaacagaacaaagaaaattacctaaacagcaaggacatagggaggaacttcttggcacagaactttccaaacactttttcctgaagggatacaagaagcaagaaaggtactctttcactaggaccttctctgagctgtcctcaggatgcttttgggactatttttcttacccagagaatggagaaaccctgcagggaattcccaagctgtagttataaacagaagttctccttctgctaggtagcattcaaagatcttaatcttctgggtttccgttttctcgaatgaaaaatgcaggtccgagcagttaactggctggggcaccattagcaagtcacttagcatctctggggccagtctgcaaagcgagggggcagccttaatgtgcctccagcctgaagtcctagaatgagcgcccggtgtcccaagctggggcgcgcaccccagatcggagggcgccgatgtacagacagcaaactcacccagtctagtgcatgccttcttaaacatcacgagactctaagaaaaggaaactgaaaacgggaaagtccctctctctaacctggcactgcgtcgctggcttggagacaggtgacggtccctgcgggccttgtcctgattggctgggcacgcgtttaatataagtggaggcgtcgcgctggcgggcattcctgaagctgacagcattcgggccgagatgtctcgctccgtggccttagctgtgctcgcgctactctctctttctggcctggaggctatccagcgtgagtctctcctaccctcccgctctggtccttcctctcccgctctgcaccctctgtggccctcgctgtgctctctcgctccgtgacttcccttctccaagttctccttggtggcccgccgtggggctagtccagggctggatctcggggaagcggcggggtggcctgggagtggggaagggggtgcgcacccgggacgcgcgctacttgcccctttcggcggggagcaggggagacctttggcctacggcgacgggagggtcgggacaaagtttagggcgtcgataagcgtcagagcgccgaggttgggggagggtttctcttccgctctttcgcggggcctctggctcccccagcgcagctggagtgggggacgggtaggctcgtcccaaaggcgcggcgctgaggtttgtgaacgcgtggaggggcgcttggggtctgggggaggcgtcgcccgggtaagcctgtctgctgcggctctgcttcccttagactggagagctgtggacttcgtctaggcgcccgctaagttcgcatgtcctagcacctctgggtctatgtggggccacaccgtggggaggaaacagcacgcgacgtttgtagaatgcttggctgtgatacaaagcggtttcgaataattaacttatttgttcccatcacatgtcacttttaaaaaattataagaactacccgttattgacatctttctgtgtgccaaggactttatgtgctttgcgtcatttaattttgaaaacagttatcttccgccatagataactactatggttatcttctgcctctcacagatgaagaaactaaggcaccgagattttaagaaacttaattacacaggggataaatggcagcaatcgagattgaagtcaagcctaaccagggcttttgcgggagcgcatgccttttggctgtaattcgtgcatttttttttaagaaaaacgcctgccttctgcgtgagattctccagagcaaactgggcggcatgggccctgtggtcttttcgtacagagggcttcctctttggctctttgcctggttgtttccaagatgtactgtgcctcttactttcggttttgaaaacatgagggggttgggcgtggtagcttacgcctgtaatcccagcacttagggaggccgaggcgggaggatggcttgaggtccgtagttgagaccagcctggccaacatggtgaagcctggtctctacaaaaaataataacaaaaattagccgggtgtggtggctcgtgcctgtggtcccagctgctccggtggctgaggcgggaggatctcttgagcttaggcttttgagctatcatggcgccagtgcactccagcgtgggcaacagagcgagaccctgtctctcaaaaaagaaaaaaaaaaaaaaagaaagagaaaagaaaagaaagaaagaagtgaaggtttgtcagtcaggggagctgtaaaaccattaataaagataatccaagatggttaccaagactgttgaggacgccagagatcttgagcactttctaagtacctggcaatacactaagcgcgctcaccttttcctctggcaaaacatgatcgaaagcagaatgttttgatcatgagaaaattgcatttaatttgaatacaatttatttacaacataaaggataatgtatatatcaccaccattactggtatttgctggttatgttagatgtcattttaaaaaataacaatctgatatttaaaaaaaaatcttattttgaaaatttccaaagtaatacatgccatgcatagaccatttctggaagataccacaagaaacatgtaatgatgattgcctctgaaggtctattttcctcctctgacctgtgtgtgggttttgtttttgttttactgtgggcataaattaatttttcagttaagttttggaagcttaaataactctccaaaagtcataaagccagtaactggttgagcccaaattcaaacccagcctgtctgatacttgtcctcttcttagaaaagattacagtgatgctctcacaaaatcttgccgccttccctcaaacagagagttccaggcaggatgaatctgtgctctgatccctgaggcatttaatatgttcttattattagaagctcagatgcaaagagctctcttagcttttaatgttatgaaaaaaatcaggtcttcattagattccccaatccacctcttgatggggctagtagcctttccttaatgatagggtgtttctagagagatatatctggtcaaggtggcctggtactcctccttctccccacagcctcccagacaaggaggagtagctgccttttagtgatcatgtaccctgaatataagtgtatttaaaagaattttatacacatatatttagtgtcaatctgtatatttagtagcactaacacttctcttcattttcaatgaaaaatatagagtttataatattttcttcccacttccccatggatggtctagtcatgcctctcattttggaaagtactgtttctgaaacattaggcaatatattcccaacctggctagtttacagcaatcacctgtggatgctaattaaaacgcaaatcccactgtcacatgcattactccatttgatcataatggaaagtatgttctgtcccatttgccatagtcctcacctatccctgttgtattttatcgggtccaactcaaccatttaaggtatttgccagctcttgtatgcatttaggttttgtttctttgttttttagctcatgaaattaggtacaaagtcagagaggggtctggcatataaaacctcagcagaaataaagaggttttgttgtttggtaagaacataccttgggttggttgggcacggtggctcgtgcctgtaatcccaacactttgggaggccaaggcaggctgatcacttgaagttgggagttcaagaccagcctggccaacatggtgaaatcccgtctctactgaaaatacaaaaattaaccaggcatggtggtgtgtgcctgtagtcccaggaatcacttgaacccaggaggcggaggttgcagtgagctgagatctcaccactgcacactgcactccagcctgggcaatggaatgagattccatcccaaaaaataaaaaaataaaaaaataaagaacataccttgggttgatccacttaggaacctcagataataacatctgccacgtatagagcaattgctatgtcccaggcactctactagacacttcatacagtttagaaaatcagatgggtgtagatcaaggcaggagcaggaaccaaaaagaaaggcataaacataagaaaaaaaatggaaggggtggaaacagagtacaataacatgagtaatttgatgggggctattatgaactgagaaatgaactttgaaaagtatcttggggccaaatcatgtagactcttgagtgatgtgttaaggaatgctatgagtgctgagagggcatcagaagtccttgagagcctccagagaaaggctcttaaaaatgcagcgcaatctccagtgacagaagatactgctagaaatctgctagaaaaaaaacaaaaaaggcatgtatagaggaattatgagggaaagataccaagtcacggtttattcttcaaaatggaggtggcttgttgggaaggtggaagctcatttggccagagtggaaatggaattgggagaaatcgatgaccaaatgtaaacacttggtgcctgatatagcttgacaccaagttagccccaagtgaaataccctggcaatattaatgtgtcttttcccgatattcctcaggtactccaaagattcaggtttactcacgtcatccagcagagaatggaaagtcaaatttcctgaattgctatgtgtctgggtttcatccatccgacattgaagttgacttactgaagaatggagagagaattgaaaaagtggagcattcagacttgtctttcagcaaggactggtctttctatctcttgtactacactgaattcacccccactgaaaaagatgagtatgcctgccgtgtgaaccatgtgactttgtcacagcccaagatagttaagtggggtaagtcttacattcttttgtaagctgctgaaagttgtgtatgagtagtcatatcataaagctgctttgatataaaaaaggtctatggccatactaccctgaatgagtcccatcccatctgatataaacaatctgcatattgggattgtcagggaatgttcttaaagatcagattagtggcacctgctgagatactgatgcacagcatggtttctgaaccagtagtttccctgcagttgagcagggagcagcagcagcacttgcacaaatacatatacactcttaacacttcttacctactggcttcctctagcttttgtggcagcttcaggtatatttagcactgaacgaacatctcaagaaggtataggcctttgtttgtaagtcctgctgtcctagcatcctataatcctggacttctccagtactttctggctggattggtatctgaggctagtaggaagggcttgttcctgctgggtagctctaaacaatgtattcatgggtaggaacagcagcctattctgccagccttatttctaaccattttagacatttgttagtacatggtattttaaaagtaaaacttaatgtcttccttttttttctccactgtctttttcatagatcgagacatgtaagcagcatcatggaggtaagtttttgaccttgagaaaatgtttttgtttcactgtcctgaggactatttatagacagctctaacatgataaccctcactatgtggagaacattgacagagtaacattttagcagggaaagaagaatcctacagggtcatgttcccttctcctgtggagtggcatgaagaaggtgtatggccccaggtatggccatattactgaccctctacagagagggcaaaggaactgccagtatggtattgcaggataaaggcaggtggttacccacattacctgcaaggctttgatctttcttctgccatttccacattggacatctctgctgaggagagaaaatgaaccactcttttcctttgtataatgttgttttattcttcagacagaagagaggagttatacagctctgcagacatcccattcctgtatggggactgtgtttgcctcttagaggttcccaggccactagaggagataaagggaaacagattgttataacttgatataatgatactataatagatgtaactacaaggagctccagaagcaagagagagggaggaacttggacttctctgcatctttagttggagtccaaaggcttttcaatgaaattctactgcccagggtacattgatgctgaaaccccattcaaatctcctgttatattctagaacagggaattgatttgggagagcatcaggaaggtggatgatctgcccagtcacactgttagtaaattgtagagccaggacctgaactctaatatagtcatgtgttacttaatgacggggacatgttctgagaaatgcttacacaaacctaggtgttgtagcctactacacgcataggctacatggtatagcctattgctcctagactacaaacctgtacagcctgttactgtactgaatactgtgggcagttgtaacacaatggtaagtatttgtgtatctaaacatagaagttgcagtaaaaatatgctattttaatcttatgagaccactgtcatatatacagtccatcattgaccaaaacatcatatcagcattttttcttctaagattttgggagcaccaaagggatacactaacaggatatactctttataatgggtttggagaactgtctgcagctacttcttttaaaaaggtgatctacacagtagaaattagacaagtttggtaatgagatctgcaatccaaataaaataaattcattgctaacctttttcttttcttttcaggtttgaagatgccgcatttggattggatgaattccaaattctgcttgcttgctttttaatattgatatgcttatacacttacactttatgcacaaaatgtagggttataataatgttaacatggacatgatcttctttataattctactttgagtgctgtctccatgtttgatgtatctgagcaggttgctccacaggtagctctaggagggctggcaacttagaggtggggagcagagaattctcttatccaacatcaacatcttggtcagatttgaactcttcaatctcttgcactcaaagcttgttaagatagttaagcgtgcataagttaacttccaatttacatactctgcttagaatttgggggaaaatttagaaatataattgacaggattattggaaatttgttataatgaatgaaacattttgtcatataagattcatatttacttcttatacatttgataaagtaaggcatggttgtggttaatctggtttatttttgttccacaagttaaataaatcataaaacttgatgtgttatctcttatatctcactcccactattacccctttattttcaaacagggaaacagtcttcaagttccacttggtaaaaaatgtgaaccccttgtatatagagtttggctcacagtgtaaagggcctcagtgattcacattttccagattaggaatctgatgctcaaagaagttaaatggcatagttggggtgacacagctgtctagtgggaggccagccttctatattttagccagcgttctttcctgcgggccaggtcatgaggagtatgcagactctaagagggagcaaaagtatctgaaggatttaatattttagcaaggaatagatatacaatcatcccttggtctccctgggggattggtttcaggaccccttcttggacaccaaatctatggatatttaagtcccttctataaaatggtatagtatttgcatataacctatccacatcctcctgtatactttaaatcatttctagattacttgtaatacctaatacaatgtaaatgctatgcaaatagttgttattgtttaaggaataatgacaagaaaaaaaagtctgtacatgctcagtaaagacacaaccatccctttttttccccagtgtttttgatccatggtttgctgaatccacagatgtggagcccctggatacggaaggcccgctgtactttgaatgacaaataacagatttaaaattttcaaggcatagttttatacctgatggccagctttgtttatttgaccaagaatctgagttagctagttctaggtactgacaggataaataaaacacaacactgctcccgatcttctcagtttagcagagggacagatatgcactcaaataattaaaatatatcctgataagaatatagcataggtacgcgcgaagaacttggcaatcgaaattttgttgttcaggctgggcgaggtgtctcatgtctgtaatcccagcactttgggaggccatggtaggatgatcgcttgagcccaggagtccgagaccagcctgggcaacataacaagaccctgtctcaattcaaagaattgaattaaaaaaaacaaaaaataatttttttaaaaaagaaatgttgttgttcaaggaacaacaacaaaaatctagggaggtgttagagaagccatttgcctgagctgagagtaagttgctagtggttctcttgattggtaggtggggcctgggtttccaggcatggtagccaggaaggacagccacatggcaggtttgggtaattccaaacagtggaggaagggtgtctgggggaagacttgtagga

SEQ ID NO: 432 - protein, 207 aa, Homo sapiens
MQSGTHWRVLGLCLLSVGVWGQDGNEEMGGITQTPYKVSISGTTVILTCPQYPGSEILWQHNDKNIGGDEDDKNIGSDEDHLSLKEFSELEQSGYYVCYPRGSKPEDANFYLYLRARVCENCMEMDVMSVATIVIVDICITGGLLLLVYYWSKNRKAKAKPVTRGAGAGGRQRGQNKERPPPVPNPDYEPIRKGQRDLYSGLNQRRI

SEQ ID NO: 433 - DNA, 1361 bp, Homo sapiens
  source 1..1361: mol_type = genomic DNA
agaaaccctcctcccctcccagcctcaggtgcctgcttcagaaaatgaagtagtaagtctgctggcctccgccatcttagtaaagtaacagtcccatgaaacaaagatgcagtcgggcactcactggagagttctgggcctctgcctcttatcagttggcgtttgggggcaagatggtaatgaagaaatgggtggtattacacagacaccatataaagtctccatctctggaaccacagtaatattgacatgccctcagtatcctggatctgaaatactatggcaacacaatgataaaaacataggcggtgatgaggatgataaaaacataggcagtgatgaggatcacctgtcactgaaggaattttcagaattggagcaaagtggttattatgtctgctaccccagaggaagcaaaccagaagatgcgaacttttatctctacctgagggcaagagtgtgtgagaactgcatggagatggatgtgatgtcggtggccacaattgtcatagtggacatctgcatcactgggggcttgctgctgctggtttactactggagcaagaatagaaaggccaaggccaagcctgtgacacgaggagcgggtgctggcggcaggcaaaggggacaaaacaaggagaggccaccacctgttcccaacccagactatgagcccatccggaaaggccagcgggacctgtattctggcctgaatcagagacgcatctgaccctctggagaacactgcctcccgctggcccaggtctcctctccagtccccctgcgactccctgtttcctgggctagtcttggaccccacgagagagaatcgttcctcagcctcatggtgaactcgcgccctccagcctgatcccccgctccctcctccctgccttctctgctggtacccagtcctaaaatattgctgcttcctcttcctttgaagcatcatcagtagtcacaccctcacagctggcctgccctcttgccaggatatttatttgtgctattcactcccttccctttggatgtaacttctccgttcagttccctccttttcttgcatgtaagttgtcccccatcccaaagtattccatctacttttctatcgccgtccccttttgcagccctctctggggatggactgggtaaatgttgacagaggccctgccccgttcacagatcctggccctgagccagccctgtgctcctccctcccccaacactccctaccaaccccctaatcccctactccctccaccccccctccactgtaggccactggatggtcatttgcatctccgtaaatgtgctctgctcctcagctgagagagaaaaaaataaactgtatttggctgcaa

SEQ ID NO: 434 - DNA, 12646 bp, Homo sapiens
  source 1..12646: mol_type = genomic DNA
aagcatttgattaatgcatgcttaaacataaagaaaggttacatcaattcacactcataccagcagactttgacactatcactctttaccctgttcaacattgagtcttgtgtttttaaatatttttgtaaagaatataggtaaaaagtggcattttttctttggatttaattcttatggatttaagtcaacatgtattttcaagccaacaagttttgttaataagatggctgcaccctgctgctccatgccagatccaccacacagaaagcaaatgttcagtgcatctccctcttcctgtcagagcttatagaggaaggaagaccccgcaatgtggaggcatattgtattacaattacttttaatggcaaaaactgcagttacttttgtgccaacctactacatggtctggacagctaaatgtcatgtatttttcatggcccctccaggtattgtcagagtcctcttgtttggccttctaggaaggctgtgggacccagctttcttcaaccagtccaggtggaggcctctgccttgaacgtttccaagtgaggtaaaacccgcaggcccagaggcctctctacttcctgtgtggggttcagaaaccctcctcccctcccagcctcaggtgcctgcttcagaaaatggtgagtctctctcttataaagccctcctttttcatcctagcattgggaacaatggccccagggtccttatctctagcagatgttttgaaaaagtcatctgttttgctttttttccagaagtagtaagtctgctggcctccgccatcttagtaaagtaacagtcccatgaaacaaagatgcagtcgggcactcactggagagttctgggcctctgcctcttatcaggtgagtaggatggagtggaaagggtggtgtgtctccagaccgctggaaggcttacagccttacctggcactgcctagtggcaccaaggagcctcatttaccagatgtaaggaactgtttgtgctatgttagggtgagggattagagctggggactaaagaaaaagataggccacgggtgcctgggagagcgttcggggagcaggcaaagaagagcagttggggtgatcatagctattgtgagcagagaggtctcgctacctctaagtacgagctcattccaacttacccagccctccagaactaacccaaaagagactggaagagcgaagctccactccttgttttgaagagaccagatacttgcgtccaaactctgcacagggcatatatagcaattcactatctttgagaccataaaacgcctcgtaatttttagtccttttcaagtgaccaacaactttcagtttatttcatttttttgaagcaagatggattatgaattgataaataaccaagagcatttctgtatctcatatgagataaataataccaaaaaaagttgccatttattgtcagatactgtgtaaagaaaaaattatttagacgtgttaactggtttaatcctacttctgcctaggaaggaaggtgttatatcctctttttaaaattctttttaattttgactatataaactgataagtcctctctacttcacagattaagaaattgatactcaaaaaagttaaataacttgttttaaaccacatagtaagtgccgaagccaatctgtgagaccaggactgtttgtactctaaatggctgcaccacatgaggcaaaatggctcgtgatggttttatttcaaagacctagaaaacactatcacagctggtgctcccgtctcagacccacagcaacgatgtctccacttcctgcttcatcttgggtttctcacgtcttgaatgtgcacacaaatcacctggggatcttgttaaaaatgcagcttctgtttcaaaagacccagactggaaatggagattccgcatgtctagtacgctctcaagtttattaatctgctgctggtcctaggaacatattgagtagcgaggggcaggatgtgactcctgtaaggagtggccaggcattttcttagagacctgtgttataaagtatgcttttccttaaaaaaaagaagaaggaggaggaggagaagggccaggtgcagtggcttacgcctgtaagcccagcattttgggggaccaaagtgggaagatcacttgagctcaggagttcaagaccagcctgggcaaagtagtgaaaccccatttctacaaaaaattaaaaattagccaggcaaggtggcacacacctatagttccagctacttgggaggctgaggtggaaggatcacttgagcccaggaggtcgaggctgcagtaagccatgatcaagccactgcactccagcctggagtgtctcaaaatagataaataaataaataaataaataaataaataaataaataaaagagacagtatcaaagacccaatcacctctagacatctggcatcataggaatgtgcccagtctgctctggggataggaaagtggggatcctgtctccccctgtgtagaggtttcagtaaaagaaaggcctaggtgtgcagaaagctttcaggcaatgccagggaaactgatcattgtaatgaatccagggtattgctgagtgagggcatcctggagggcccggtggaaatgtggtcaggctcttcaatgcacaggccctagttgatgagtaatcagggtttcaaatatttccatctctgtctcaagcagaaaacaaatggaaaaactgaaccaccagaaaagcagagccagagatggaacaagaatcccagtgtttgtacccaaccaagagcgtgtttttcttccacagacaccaatgttcaaaatggaggcttgggggcaaaattcttttgctatgtctctagtcgtccaaaaaatggtcctaactttttctgactcctgcttgtcaaaaattgtgggctcatagttaatgctagatgcttccttcctctatttccccccaaatttcctgggaacccctggtcaataccagcagtaagttccactgttctagggtgtagaaatggctgtgacccagcagcaagagggaaggacatcagatgtcatcagtggtcatactgcaacacagccctttttctgtttaggaatgcaggtacccacaacatttactaacactttttttttcttatttattttctagttggcgtttgggggcaagatggtgagatatgctttctttctttcttttttatgaaatcaccccatcattctttgtagttatgaatggagctttctcttaggcctcccacagaacttccacagaggtcaggaaaaggagtttctgccatctacccctttgactttcctcacaagtctggagatatttctagcccagaagagggaagcaacagaggcaggaaataatgagtcttaaccatacaaaagaaaaattgagacttaaatgaagttgaaagcactaacagttttcatttgtttgcatttcatatttgatgtgagattctgcagaggagacgtagccagaatgcatgcacagggttactctggataagctgctggggcaacatttggatgtgtgttcagaatcacatgtctgaatactctgaatatatgtgtgtacatgtgtatttatgcaagtgcacatgcatatgagtgtgcccggcctgaacttactctctcaaccacagcggtagagtcaggagtgttccaacattggaagcccctctattcaatcagctcttccaaactgagtgaaccaatgttgtatttaatggcaaccatggctggacaccatggctcacacctgtaatcccagcactttgggaggccgaggtgggcagatcacttgaggccaggagttcgagaccagcctggccaacatggcgaaaccccgtctctactaaaaataccaaaatcagccagacatggtggtgtacgcctgtagtcctagctactcgagaagctgaggcaggagaatcgcttgaacctgggaggcagaggttgtagtgagccgagatcacaccactgcactctagcctgggtgacacatcgagactgtctcaaaaataaaataaagacaaccattatgccagcctagattccgccatgctgcctaatttgtagtgtccttaggagccatttttgtaaatagtcatcagataagatgtaaggcccataacagctttttctatgcagctgagggaattggaagatccattgtttcctaagagttgagggaagagtcccaacccacgggagcagggtctgatcttcattgccgatagaaacattactaatggcttcttactgtttccttttcaggtaatgaagaaatgggtaagaagatttccactctatctagcaaaagttttcaaatatggaatgaaatgctcatagagtacaatcacagtaacaaaccctgagaactaaaactattaaagggaaaatacaagtatctttcaatgggatccgtatgaaacttgcctgtatttgttgctagctgtcatgtcagattatagctgtgcatatatgtatctctgatcatacacatatggatgtgggttggagctaccatgtgtttttgtataagccatgaaatctttgaaggcagacagagacagtgtctcatttacctagcccagtgtctggcacatagtaggtgctcaatgaatattttttgaatgaataaatgaacaaacatatgaacacattgctaattacctcccctcaagaagctgatggtcttgtgtgagagacaaataattgaaaatatagtgagttgcatgttataatatgggtagatacagagtaaaatgaagtataaagaggggagtggtcaactctactgagtgtcgttgggaaaggttccctgggggaggtggtccttgagctgaattttaaaggataagcttatgttttagggaagaaaaatattttatgcagaagagataaagctgtatagtatgaggataagagtctaactgagctagatcagaatgtttgaatcttggctcaactctctacttgctgggtgtgtttgagtaatttacctaacttttctgtgccacagcatcatcatggtacaatggaaataatagtgctacctaacttgtagggttattatgaggaccaaatgagtaattcatttaaggcacttagaacattatctgacataaaaggcagtaggagggccgggcatggtggctcacacctgtaatcccagcactttgagaagccgaggtgggaggatcacctgaggtcaggagttcgagaccggcctggccaacatggtgaaactccatctctgctaaaaatacaaaaattagccaggcatggtggcaggtgcctgtaatctcagctactcaggaggctgaggtaggagaattgcttgaacctgggaggcggaggttggagtgagctgagattgtgccattgcactccagcctgggcgacagagcaagactctgtctcaaaacaaacaaacaaacaaacagacagtaggtgaattttagctattaatacatggaaagcatgctgactatagatgataagcattaaagtttactgagcatgtatgttttaggcattgctctaaatattttacttgaatttcctcatttaattcttccaacacccctactgtacagttaaggaaacaaagcctcaaataaatacagaaataaacaaaaataagtaaacaatccagtcctggggatataaatgcagatttaggccaagtgccatggttcatgcctataatcccaacactttgggaggccaaggcaggaggctcgcttgagctcagaaggttgaggctgcattgagcaaagattgtgccactgtactcgagcctctgtggcagagaaagaccctgtctctgaaaaaattaataaatagaaatttaaaaataaaaaaattttaatgcagatttatatgataccgaagttcattttctcaaccattatgaaatactgtttctggatatgtataaaatctttgtgagcacacatatctttttttaacttaactttcattttaaattcaggggtacatgtgcaggtttgttatataggtaaacttgtgccatgggggtttgttgtatagattatttcatcacccaggcattaagcctggtacctgttagttatttttcctgatcctctccctcctcccaccctccaccttctgagaggtcccagtgtgtgtcatttccctctgtgttcatgtgttctcatcatttagctcccacttctaaatgagaacatgtggtatttggttttctgtcactgtgttagtttgctaaagataatggcctccagtcccatccatgttcctgcaaaggacgtgatctcattcttttttatggctgcgtagtattccatggtgtatatgcagcacatttttttatccagtctaccactgacaggcatttaggttgattccatgtctttgctattgtgaatagtgcacaatgaacatacgtggagcacatttctgtctaagcacagacatctagacccttgtgtgagcatgagttaagtctaagctctgctactgaatttgtgccaataaaagttgtgagcaattttctttacatttttttcaaacaaacacacccagcagagtataatgtctatgtactttatttatgatttctagttcatttaacatgtctaagaaacatccgtgttgaaaaattatttataaattaaaataatataaactatctactgtccttatactcaactcccaattataagcaggtggaaaaacctggagaatgttttgtttacattctgtgcagtctttgtcagagggctgcctgagcaactgggtcagagtttagttctgctctgggagtagcaggacctcaagaaggaaaggaggaaaggaagtaactttttcttgagcacctgctatgtgtcattcactttcaccttcataatccatttaattttcgcaaaaactttgtgaggttggtgttttatctccatttccctgataaagaagttgaggttcagcaaagttaaatgacttgccctcagtcacacagactagggcagatccaggattcaaactcagggcttctgactcttgagtccagagctctgtccctgacagcagcagcactgcctctcctctcttccagctgttatgtccagactgtagcagaacccagtgttccagccacaagttttccaggaaataataaaggactcctagctccacctcccagggcaaaaatggctgctgtgggaaacacaggctggacctacgaatggcattagtggtttattagttgatttcagttgtccacactaataggcctccctctaacaaaaataattgagagctgattatgctcagatataatgtaaagtgaagccactttttattggaagaagcattccctcaaaacgtgtagagtatttcacattatttaaaggcaaatagagagaaaattatatggaataagaacaaagatgtttcttctctattatgagggactcagttctgagaaaggattttaaattgtaagaaataggtaagtccacgaatcagtgattcagtggtgtggagagctttatttctgagaaggccagtagcgctcccttctgacaagcaaatctaagacctggatgacagatgacttcctgcatttggttggttcttttgtcattcatatctatctgtaatacagttctggctaatttaagaggataagcttgaagacctctggaatttttcggctttaggactttaaggctttctgagcttcagtagatctagatctaggagctcatgctggtatattctgaatccgatgtatctgagttacatctatgagctacttaataaatatatctatgagctaaatctcataggctaagcatgaacctcacctccaagactcggggttcctaaatggatgagaccctctttgggaagtcttgtgggcagtgtctaattccactagaaaagttttacctacaatttaaacttaaaccatgatattttcttactgctgtttccttttttcattttcaggtggtattacacagacacgtgagtttattggtcttttatttatgccctgtctgaggatgcagattggtgggtagatgagaaggaactgattgagagagattaaccccaagaactgatatcttcccagcattgcattctcaactccattttagaaaggttccaaatagggacttctgtgggtttttctttacatccatcttacccttcccaagtccccatgtccctgcgtaaaccctaaagccacctctcaaaaggttctctagttcccttcaaggttctctagttcccttcattccacatatctcctcttccacaccctctagccagtagagctcccttctgacaagcaagtctaagatctagatgacagatgacttcctgcatttgggtggttcttttgtcactaatttgccttttctaaaattgtcctggtttcttctgccaatttcccttctttctccccagcatataaagtctccatctctggaaccacagtaatattgacatgccctcagtatcctggatctgaaatactatggcaacacaatgataaaaacataggcggtgatgaggatgataaaaacataggcagtgatgaggatcacctgtcactgaaggaattttcagaattggagcaaagtggttattatgtctgctaccccagaggaagcaaaccagaagatgcgaacttttatctctacctgagggcaagaggtaatccaggtctccagaacaggtaccaccggctctttagggaggaccattcaaaagggcattctcagtgattttccctaacccagctcacagtgcccaggcgtctttgcgcttcctcccacactcaatcctgggactctctggtaccacacggcatcagtgttttctggaatatagattaaacaccaatatgaggcttctgggtaaccccagtctgtgcgagatctaaaatagcaactccctaagagacaggactgggtcatttgcaccgcatcacacccaggttcatagcacaccaacatgagtttatctaatgcttcctccagagataaatttttcagaaaggtttgcaaaaaacactcaaggccactatagtaaaatggcataagctaaggtataataataaaataataacaatacttaacatttattgagtgcttattaagtctcaagcactgtctgtacccaacacttatcaaggattctttttcatgtaatcctctcaacaactatatgggttaagtatcattttattcccatgagtaaagggatgaggaaacagagggtttgtgagttgaaaacacatttcacgcttctcacagctagtgagtaataaagctgggactcaaacccagggctgtttgactccagtgcctctacccacggccaccactctttgcttgtcaatgttgttctaaacatattgaagggggggctctgaccgtggcaagcgtgtgagtagtaaggggagaatggccttcatgcactccctcctcacctccagcgccttgtgttttccttgcttagtgatttcccctctccccaccccaccccccacagtgtgtgagaactgcatggagatggatgtgatgtcggtggccacaattgtcatagtggacatctgcatcactgggggcttgctgctgctggtttactactggagcaagaatagaaaggccaaggccaagcctgtgacacgaggagcgggtgctggcggcaggcaaaggggtaaggctgtggagtccagtcagaggagattcctgccaagggggacgaccagcctgggccagggtgggtggcaagtccacagctaggtcagaacagcttctctagagcttctatgcacagcttctattactgtgatgacaagatctcaacagacggtttcaaatctcacatcactcccctccttcccatcctagaaaagtgcaaaaaagtttatgaaagtgatgggcttcctcacatacctgtcaatgcctgcagtcatccgattccgcccctaagctgtgggaagagagactttgatatattagctcctgccttttcctttcccttcccctatggagagaaacaatgggaggatcttgagctgaggaaagtcacaaaatgatgagaagagtgtagggtccttagagatgaatgaaagaaaaaaaaagagaaaggacgtctgaacagaaaagggagcggtagaggagagaacaatggggtttgccattctctatctgggtctcactggcacagacagtgctgcaagattggttccctcatgggaatgaaatgtttcccctccttcctccgcaggacaaaacaaggagaggccaccacctgttcccaacccagactatgaggtaacgtgggatagaaatgggccaggacgctggaggggatgtccctccaggggggaaggaaacagatgggatggcccatcttgtctgccagatgcctcaaagcccctcactcagggcttccattacaaccctctatgtgccacctctgcgtccttcatggtaaaacaggactgtctcaaaggctgcatggcttccacaaccatggagaggtggaagcttgcaggagacatactcctctttctctggcttattcattgactgggatacagccatggagaatattatatatgcaaattctaacacaataaattctgggctgatattccaccagcatgcaccagtatagcgagttattgaaatattaaaattatataaatattatataaaagttattgaaatattaaaatactcattgggaaatagccccaaactttgctcaccccaacccacccttacacacacacatacacacacacacacacacacacacacacacacacacacacgtgaccagacatcccagtccctcccctaccgggctgcctcttgagttggggtaacaaagagttaatgcctggcatggcagaggatcaccaggattgttctagttgattggtatgtgtgcactcctagttgttaaatattttcactatcacacctggatatactcaacaaatatttgttgagccaaatactcaacaccagccaaacacgtagtatttactttagcttaagcgaattatttagccctgacagaagccctggaatgtgggtctttaagttcctatttttgagatgggaaagctgaggctcacggaaggaggtgaccagctcaagtctcctaccgtccatgccaaattagaattccagcctgcctcctgacttcaagtccaaagttcttcccacgcactaaagctagctcttcagtgtcctttcttaggaggtacttcctcccgcaccactgaccgccccctctctatttcacccccagcccatccggaaaggccagcgggacctgtattctggcctgaatcagagacgcatctgaccctctggagaacactgcctcccgctggcccaggtctcctctccagtccccctgcgactccctgtttcctgggctagtcttggaccccacgagagagaatcgttcctcagcctcatggtgaactcgcgccctccagcctgatcccccgctccctcctccctgccttctctgctggtacccagtcctaaaatattgctgcttcctcttcctttgaagcatcatcagtagtcacaccctcacagctggcctgccctcttgccaggatatttatttgtgctattcactcccttccctttggatgtaacttctccgttcagttccctccttttcttgcatgtaagttgtcccccatcccaaagtattccatctacttttctatcgccgtccccttttgcagccctctctggggatggactgggtaaatgttgacagaggccctgccccgttcacagatcctggccctgagccagccctgtgctcctccctcccccaacactccctaccaaccccctaatcccctactccctccaccccccctccactgtaggccactggatggtcatttgcatctccgtaaatgtgctctgctcctcagctgagagagaaaaaaataaactgtatttggctgcaagagttgctgtccctgttttctgagagaccctcagaggctgccttaactcccaagaccattcaggttctcactatctttgactaaattctcagctatgaccccagatgcgagcactctctgtttccacagctggtagggccgttacctgaagctctctttagagagggcataagggaataagaaaaaaaagagagagagagagtgaagggaggggaaagaaaagaaaaagagagagagaaagaaaaataaaaggaaagggaaagaagggagggattgaggaagggaagaaagaaagaggatgggagggagagaaagaaagaaagtttcaccaacttctcttggaggaaaacatcaaacgtggcagagaaagactgatgggtccctgatggagtggttggtagaaaatggacaagacagaaataggccttgaaagacagatgaaggtacggaagaggacggtggcggtggaagccgggcttggagatgggacacagatttccacaagctgccaggaaaagctgcgagccagggctggggaagtgaaggagggaggtgtctcaagcaggcacacccccaccctgaggcagccgcctgcagccaga

SEQ ID NO: 435 - protein, 182 aa, Homo sapiens
MEQGKGLAVLILAIILLQGTLAQSIKGNHLVKVYDYQEDGSVLLTCDAEAKNITWFKDGKMIGFLTEDKKKWNLGSNAKDPRGMYQCKGSQNKSKPLQVYYRMCQNCIELNAATISGFLFAEIVSIFVLAVGVYFIAGQDGVRQSRASDKQTLLPNDQLYQPLKDREDDQYSHLQGNQLRRN

SEQ ID NO: 436 - DNA, 2690 bp, Homo sapiens
  source 1..2690: mol_type = genomic DNA
agtctagctgctgcacaggctggctggctggctggctgctaagggctgctccacgcttttgccggaggacagagactgacatggaacaggggaagggcctggctgtcctcatcctggctatcattcttcttcaaggtactttggcccagtcaatcaaaggaaaccacttggttaaggtgtatgactatcaagaagatggttcggtacttctgacttgtgatgcagaagccaaaaatatcacatggtttaaagatgggaagatgatcggcttcctaactgaagataaaaaaaaatggaatctgggaagtaatgccaaggaccctcgagggatgtatcagtgtaaaggatcacagaacaagtcaaaaccactccaagtgtattacagaatgtgtcagaactgcattgaactaaatgcagccaccatatctggctttctctttgctgaaatcgtcagcattttcgtccttgctgttggggtctacttcattgctggacaggatggagttcgccagtcgagagcttcagacaagcagactctgttgcccaatgaccagctctaccagcccctcaaggatcgagaagatgaccagtacagccaccttcaaggaaaccagttgaggaggaattgaactcaggactcagagtagtccaggtgttctcctcctattcagttcccagaatcaaagcaatgcattttggaaagctcctagcagagagactttcagccctaaatctagactcaaggttcccagagatgacaaatggagaagaaaggccatcagagcaaatttgggggtttctcaaataaaataaaaataaaaacaaatactgtgtttcagaagcgccacctattggggaaaattgtaaaagaaaaatgaaaagatcaaataaccccctggatttgaatataattttttgtgttgtaatttttatttcgtttttgtataggttataattcacatggctcaaatattcagtgaaagctctccctccaccgccatcccctgctacccagtgaccctgttgccctcttcagagacaaattagtttctcttttttttttttttttttttttttttgagacagtctggctctgtcacccaggctgaaatgcagtggcaccatctcggctcactgcaacctctgcctcctgggttcaagcgattctcctgcctcagcctcccgggcagctgggattacaggcacacactaccacacctggctaatttttgtatttttagtagagacagggttttgctctgttggccaagctggtctcgaactcctgacctcaagtgatccgcccgcctcagcctcccaaagtgctgggattacaggtgtgagccaccatgcctggtcttaaaaccagtttcttatatatctctctggaggtattctaggcatatatgagcacattctcaagtacatattatcctcccttcccctatcttttagacaaatgatatcaaactatacatcttgtgagattattgcataccattatatgaagataccattatatcctttttaatgcaaccatattgtacaaatagactatgatttatttaacctgttatctatcagtggatatttaagttggtagttggttccaatcttttgctcttacaacaattctgcaatgactaacattgtataaatatcatttttaaaaataattgcattgaagcataatgtacatgccataaaatccacccatcttaagtgatttcacctgttctcagaaatttttagtaaatttaactaattgtacagccattaccataatccagctttaggacattttcttttttttcttttcttttcttttttttcttttttttttttttttgaagtggaatcttgctctgtggcccaggctggagtgcagtggcgcgatctcagctcactgcaacctccacctcctgggttcaagcgattctcttgccttggcctcccgagtagctgagactacaggcacatgccaccacgcccagctcattttttgtgtatttagtatttgtgtatctagtatttgtgtacttagtagagacagggtttcaccatgttggccaggctggtctccaattcctgacctcaggcgatccacccgccttgacctcccaaagtgctgggattacaggtgtgagccaccgcgccaggcccgtaactgtattttaatatagccattctatggatttaatatggtattttattatggccttaatttgcatttccctagatactaaccatgctgagtgtcctgtcttgtgtttattaaccattcatatatttttagtgaaatgtgtatcaaatcttttgcccatttttaagttgacttatttgtttgtcttcttactattgggttgcatatgtttttgatataagtcctttatcagatatatgatttggaaatattttctaccaatctgtggtttgtttttcttaatggtgtcttttgaagtgcaaaaggtttgaattttgaagtacattttattgattttttcttctatatattgtgcttttggtatcatgtctaataaatctttaccaaacccacagttacaaagattttctcctgtcttctttttatactttttacagctttatggttttagctctaacaataaatgtgattttgaacatacataagactatttgtaacaaacacaaataaattgaattgttgggca

SEQ ID NO: 437 - DNA, 12018 bp, Homo sapiens
  source 1..12018: mol_type = genomic DNA
agccgggcttgctggcacgcacctgtaatctcagctactcaggaggctgaggcaggagaatcgcttgaaccccggaggtggaggttgcagtgagctgagatagcgccactgcactccagcctgggcaacaaagtgagactctgtctcaaaaaagaaaaagaaaaaaaaagtgaaaaaaattcctgaatgaaggcctggactgaggtggctttccatttggaggtccagccccaagcatctgagagtccctcctaaattcattacctacagcaacaacaactagcaacaagtaacaactggctacgatcctaacaactaatgacagggacatttatctccctcatgaagaaacggtcccaggaccatctcccacccagcatccattgcggttccctgtgcaagatgagtctctgagtgggaatccagcactctctccctcttcttccccaccaccttcaccctccttaacggaaaaacaaaaggcatctgcacctgcagccctgctgaggcccctgctgctcacacttgcagcagagggtggaggctctgggttcttgccttctctcaaaggccccagccccaacagtgatgggtggagccagtctagctgctgcacaggctggctggctggctggctgctaagggctgctccacgcttttgccggaggacagagactgacatggaacaggggaagggcctggctgtcctcatcctggctatcattcttcttcaaggtaagggcctactaggggtctggaagcctggggaagggctcaagggaagagcccatcactagtgagacaggaatattggtatccctaaccttcagcctacctctgctgtcaccttagagttcaaagaagggcaaaatggaggctcttaactgttctctgctagagagaaacagtgtcccatggaggagaaggaatccttgtctctgaaaaatgcaaacagagtacttaaatggctgaagagaggaccctgttaccgccatcttagatttgaatgcagcccaaaagggcataggccaagaaactaaaaggaaaaagtatatgttccctacttcagagctgggggctagcagtcgacctaggaaatgtccattcactcagttgggcagttggccaattggtcaacaaagatgggtgagaccctaatatgtgatatgccatgaggaaataaaaatgaataaaacacttatgctctacagaactcatagtctcattggagagattagttttcatggtgccagactgagtgtacagtatagtatgggtgcctgcatgaatactccattggactatccaataggaagtggatgaactgggttgatgcctggagtctggacatcctgggaaagttaaaaccatggaatttgctgaagtcacacaagtactatgtgaggaagagggagctgaagatggaacagtgagggcaccaattttaaggggcagttagagaaaaaaaaacattccaggaaagagataaaaggagaatcaaagagctgaaataatcaaatgtatgcactaccttggaaaccaagagagtagagagcttctagaagaagagaattaccaagagtataaaatgttaaagagagcccactaatataagaatatatttaaaagtttaagtctgcgggatgtggcagaatatgcatcatgggtgatttagcacagtttcagcagggtattgtgagtggaagccaagtgaaaattggtagaaggtgaaggtcaggtgatgaggtcagcaagtgtagactattctttaaagacatttggatgaggagggagaaaagactgggtggtaggtagaggaggaagtagagtctaagaataaatgtttttgagggtgagagaaacttgagcacatttctaggctaaaggagaagatgatgagtagagcaaggtcctggagttgatggtggaaggacagagtcaagagtggggtcaagagcacagagaggaaggcaacgttaccctctaagaccaggagaaaggaagtgcaaacggcactggccacaaataggtttataaagggaaaggaagctaaaggagaaaggacaataacaacttccgtgttctaaaaaatccaggtgggaggcaatgccacctgctgaaactgagctgggtgatgaccggttgggagacttgaagaggacagtgagagtttagaatagaattatttctgagagaaatgcaaggaaaagtcaggtaaagacaacacaggttgaggagcaactctcaagcctgggtgaggtggctgcatatcatggaaagagcatttgagttcagcagtagaaaacctgagctctggatccagcttggacaccaatgagctatgtgtacttgaacaactcctccactgtctgggagttctcatgccagccaatccagaaatgtggcagggacgggcatggtggctcatgcctgtaatcccagcactttgggaggtcgaggcaggtggatcacctgaggtcaggagttcgagaccatcctggtcaacatggtgaaactctatctctactaaaaatattttaaaaattagtggggtgtggtggtgggtgcctgtaatcccagctactcaggaggctgaggcaggagaattgcttgaacccaggagatggaggttgcagtgagccaacacggtgccactgcactccagcctgggcgacagagtgagactccgtctcaaaaaacaaaacaaaaaaaaaagaaatgtggctatatgaactcttaagtcctaaaaggaaacctcactcagatatgcaacattaaaagatgtcaatcagccaggcacagtggctcatggctataatcccaacactttgggaggctagggagggaggatcatttgagcccaggagttcaagaccaacctgggcaaaatagggataccctgtgtctacaaaaactacgaaaattagccaggcatgttggcatgcacttatgccagctacttgggaggctgaagtgggaggattgcttgagcccaggagcttgaggctgcagtgagccatgatcacaccactgcacttcagcctgagtgacagagcaagaaaaaaaaaaaaagatgtctcaaaaaaaaaaaaaaaaactatgtcaatgatcagtgcaatctccttccctgaatccaatttagaatgaggggtctctgtcttctctcggtcttctgaccaggtggtcaggagaaaaactagttagaaacctctttaactgtttgtcttgccttttctcccatttgctcatttattcatttgcacattcattcaacaaataaagttcctaccatgttccagacactgcactggatactgttcaaaaataatcccgccctgcatgaggttctaagacagttcacttcttgtatttccattatactttgactcatgaccgcctctccctatcacacacactccacctctagccacactacctctcttgtccttttccaaagctgcatcttattcagctattctttctactcagaatgactttctctatctggtatattcttgcttactcttcaaggcccagacaaatgtcgtttcctctattaagctttccctgatcctcacccttggacaaaattaatagcttctacccttttttcatatgcagtcatataagcactaaaagataatgtatacattctattaaattaattgcatatatgttttaattttttcacttcattcataaactttggaagcagcagttgattcttcatatcagcactcttttctttcataatatctaattattttaggtcataatagtcctcgttaaatgtttggattaaatctaattgaattgaattcaagtgccagatctctgtaatatgtctaccatgcaactctactaccctaaggttttgtttgtctgtttgtttgtttttatttttttgagacagctttaacacctaggctggagtgcagtggtgcaatcttggctcactgcaacctccacctcccaggctcaaccattcctcccacctcctgagtagctgggactacaggtgcataccaccatgcccggctaatttttttgtattgtctgtagagacagggtttcgccatgttgtccaggctggtgtctaactcctgggctcaggcaatctgcccacctcagcatcccaaagtgctgggattacaggtgtgagccactgctgccagtcaactctgagttatgagacagatttgaggactaattgaaaagctaacttccctgggacatccagggtttttataataaaaggatcaccaaggctgaatattttataaggaactcagcctaaaggttttggatagtgcacacccactccttgccagggcattagctgctcaagaagcagagtgttctggactggataggcaatatccttacttacatatactacaatacaattctgatgctaaccccccaaattagtgtcagaccctacaggttaagagcatggttcccaaccagattgccctcactttaaatgccagctacaagttcagggtaccccagaccactcacatttctgacaaactgcctgcaatcttaaggattcccatgaccctcctcattgataatttgctagaataactcacagaatttaagaaagtgctgtacttcctatttcagttttattaaaaaataaaataaaatcagaaccagctaaatgaaaagggcaaggtctaggagggtcccgaacacagagcctccgtgccctctccccgtggaattagaacacatcgcccccagcactctcccacactctgccagcacattgatgggttcaccaaccaggaagctccaccaagtttttattgaggtatctttacataggcatgattgattgaatcattggccgcttgactgatctcaatctctaggatcccttcctggggctgataccactagtttcaaagctgcaatcctcttaccatatggttggtcttgaccagcaccatcctgagtcattgccatgcataaactcaggtatggtctaaggatccaccacagataacaaagccactcctgtcactcatgaaattccaacggttagaaacaccctcccaggataccaggacaaagatgagacaaattgtttattatcaccttgaattcaattgagtgatttagtctacaatccggaaaactaagtatagatactaccattttcatggatttggatctttcttcatcttggcctcaaataaccatggaaatacttcagggcatctgaacaactccatgcccagctaatactctatctctcttctgtctttacaggtactttggcccagtcaatcaaaggtaggagaaatggcttctttctatactcagactcagaatattgacggaaatttggcttcctacaacagtagtcctacaggagcgaacagtttagaatgaatgaaatgacggggatagagaggtgatgtctctattgtcaaccaaatcagtgacctgacataacctgttccgggcagcttgcctgtagctaagcatttaactggtctcttacaggagaagcaggaccctagtagctagggacacatctcaaactgtgacccatgaaccagtaggtattggcgtcacctgggatcctgacgttagtctctgtcaatccttctctttagttcatctattctacccaaagtgatctcatcatctggtatgctgttagcagtttcttacctgtatagtatcttccaaataacatgccccaaaatcccaaagttttacccctactaattacagcaatgtctcttttattcttcaccccctgacgcagatattggcgtcacccgagagcatgttagtaatgcagaatctcccctccccagaactactaaatagcacctgaaattttaacaagatccccatgtgattcatgtgcacatcaaagtttgagaaacactactctaatgatctcctggtatgcagaagcagggagaatttcagaggcaagatccttaatagaaccacggcttttctcatttcaggaaaccacttggttaaggtgtatgactatcaagaagatggttcggtacttctgacttgtgatgcagaagccaaaaatatcacatggtttaaagatgggaagatgatcggcttcctaactgaagataaaaaaaaatggaatctgggaagtaatgccaaggaccctcgagggatgtatcagtgtaaaggatcacagaacaagtcaaaaccactccaagtgtattacagaagtatgtaatcccctttggtctgtttgttgtgaaattaatcagtatttgctgttctggtgagctttttatctggggtgaaagtggaaatagatcctcaacagtaatattatcgcctgttctcttaatttcagcttgcctcttttaaaatactgtaagatacttccctcaccctattgaaaaactacagccagtcctgtaaaattttgtttacctttgggtgggctccatggattcaagcaattcagcactgagttgaatgaaggggttggggagacagaggtgatcataaggtgagcagcagtgagaactggagcgcagtggagcatgaagagtatctagtcttccttctgttccagatacttcctggtagttagactacatgggcttccccaggaatcctgggggacttaagagcatcaagatgcattgagttttggcgcaaggatcttcccttgccctgccacccacagaggaaaagcctgctgccctccacagcggcattattgcagacaggcaggagaaaacgaaccaggaaaaacaactttcgcaacctgaaggtttgtctctccttttccctacagtgtgtcagaactgcattgaactaaatgcagccaccatatctggctttctctttgctgaaatcgtcagcattttcgtccttgctgttggggtctacttcattgctggacaggatggagttcgccagtcgagaggtaaaagaatgctcttagatgagagatgggaccacctgagaccctcagctttcctcctaccattatgtacccaatggaagagactgagttggtgcttcttgctagtgtgcatagttgggtgaggctgtatttctctgagacaggagaaaggatacttggtgttatcacagcatgttcacctgtctcaagatacagctccctctgtgaaaaaaaaaaaaaacaaaaacaggcgcagtggctcacgcctgtaatcacaacactttgggaggccgaggcgggcagatcacgaggtcaggagatcgagaccatcctggctagcacggtgaaaccccgtctttactaaaaatacaaaaaattagccgggcgtggtggcgggtgcctgtagtcccagctactctggaggctgaggcaggagaatggcatgaacccgggaggcggagcttgcgtgagccgagatcgtgccactgcactccagcctgggcgacagagcaagactccgtctcaaaaaaaaaaaaaaaaaaaactattttaagtaaacccttacatacagaaaagtgaatcacaagcatacagctcaaaaaaaaaattcacagagcaaatacacccatgcagccagcacataatttaagaaagacaatattaccaatgccattgaagcccctcttgtggtcacttccagccactacccatcctcaagagtgagcattgtcctgacttctaacaacaaggattaactttgcttgtttttgtcctttatgtaaatggactcatatactaagtattcttgtgagtagcttctttcactcaacaacatgtttatgtgctttatccatactcttgtgtatatataaaactcttattgttatttagtattccattttgtgaatataacccaatttattatgcattctaccttgtgtggattctgtttcttttttgtgcagcttcagacaagcagactctgttgcccaatgaccagctctaccaggtaaggggatgaagaataaaagagacattgctgtaattagtgggggtaaatctttgggattgaggggcatgttatttggaagatcctatacaggtaagaaactgctaacagcataccagatgatgagatcagtttgggtagaataaatgaactaaagagaaggattgacagagactgaggtcaggatctagtgagcacaagttgaagaacacactgagagggacacacgaagaaactctcgacaggctgggcactcactatagacaggccatggctcatgcctgtaatcccagcactttgggaagccaaaacaggtgaatcacctgaggtcaggaattcgagacaagcctggccaacatgatgaaactctgtctctactaaaaatacaaaaaaaattaaccaggcgtggaggcgcgcgcctgtagtcccagctactcaggaggctgaggcaggaggaccacttgaacccaggaggtcgaggttgcagtgagctgcgattgtgccactgcactccagcctgggcaacagagaaagactccgtctcaaaaaaaaaaaagagagagagagaaaaagaaaaaagacagagcctccatctccttgtcctctttccatcctcaggaccatgaagtacccactccaaattctcacatataaaaaacattcaataaacatgcatcaaattaattaatagaggatggaaaaaatgacttatgactgtgctgtcctttccagcccctcaaggatcgagaagatgaccagtacagccaccttcaaggaaaccagttgaggaggaattgaactcaggactcagagtaggtgggttcttcaatgccaattctaataaaggacccttgcatcaactgccctcgcaattgcttctaagtctagctcccttccctaagcggctataagcatcagactctggggatcagggattgggacgtggtttggggtactcttttctaaaaattctggggccatactgattgtcttggcctaggtaaatatgaattttatgtatctgtaaatcctgtcagagcagggcctcaagccatagagatgctgaatattaatcttaacctacatttgaatttctcattatctacactattaacattttgggctaattaattatttgtgatgaggggctagcctgtgcattgtaggagttatggaagcatccctggcctctctccaccagatgctggtagattgtccagtgtgacaatcaaaaatgtgtccagacattaccaaatgtgtccaaacatcacctccagggcaaaatcacccttagttaagaaccactaacccatattaaccttccaatcaataaatcaatcagtcagaagttatgatttaattaatctatctgaagtttctatcaggaagacagggttgaaagcattatttgttttttttgaacaaattgcaatttttcttttttcagtccaggtgttctcctcctattcagttcccagaatcaaagcaatgcattttggaaagctcctagcagagagactttcagccctaaatctagactcaaggttcccagagatgacaaatggagaagaaaggccatcagagcaaatttgggggtttctcaaataaaataaaaataaaaacaaatactgtgtttcagaagcgccacctattggggaaaattgtaaaagaaaaatgaaaagatcaaataaccccctggatttgaatataattttttgtgttgtaatttttatttcgtttttgtataggttataattcacatggctcaaatattcagtgaaagctctccctccaccgccatcccctgctacccagtgaccctgttgccctcttcagagacaaattagtttctcttttttttttttttttttttttttttgagacagtctggctctgtcacccaggctgaaatgcagtggcaccatctcggctcactgcaacctctgcctcctgggttcaagcgattctcctgcctcagcctcccgggcagctgggattacaggcacacactaccacacctggctaatttttgtatttttagtagagacagggttttgctctgttggccaagctggtctcgaactcctgacctcaagtgatccgcccgcctcagcctcccaaagtgctgggattacaggtgtgagccaccatgcctggtcttaaaaccagtttcttatatatctctctggaggtattctaggcatatatgagcacattctcaagtacatattatcctcccttcccctatcttttagacaaatgatatcaaactatacatcttgtgagattattgcataccattatatgaagataccattatatcctttttaatgcaaccatattgtacaaatagactatgatttatttaacctgttatctatcagtggatatttaagttggtagttggttccaatcttttgctcttacaacaattctgcaatgactaacattgtataaatatcatttttaaaaataattgcattgaagcataatgtacatgccataaaatccacccatcttaagtgatttcacctgttctcagaaatttttagtaaatttaactaattgtacagccattaccataatccagctttaggacattttcttttttttcttttcttttcttttttttcttttttttttttttttgaagtggaatcttgctctgtggcccaggctggagtgcagtggcgcgatctcagctcactgcaacctccacctcctgggttcaagcgattctcttgccttggcctcccgagtagctgagactacaggcacatgccaccacgcccagctcattttttgtgtatttagtatttgtgtatctagtatttgtgtacttagtagagacagggtttcaccatgttggccaggctggtctccaattcctgacctcaggcgatccacccgccttgacctcccaaagtgctgggattacaggtgtgagccaccgcgccaggcccgtaactgtattttaatatagccattctatggatttaatatggtattttattatggccttaatttgcatttccctagatactaaccatgctgagtgtcctgtcttgtgtttattaaccattcatatatttttagtgaaatgtgtatcaaatcttttgcccatttttaagttgacttatttgtttgtcttcttactattgggttgcatatgtttttgatataagtcctttatcagatatatgatttggaaatattttctaccaatctgtggtttgtttttcttaatggtgtcttttgaagtgcaaaaggtttgaattttgaagtacattttattgattttttcttctatatattgtgcttttggtatcatgtctaataaatctttaccaaacccacagttacaaagattttctcctgtcttctttttatactttttacagctttatggttttagctctaacaataaatgtgattttgaacatacataagactatttgtaacaaacacaaataaattgaattgttgggcacttgtatttgcatttgtaattttattaactattgccaaatagcagttgtaaacacgtacacacacacaagtgtatatacacatatacatatatatacatatacatgtatgcatatatgcatatatacatatatgcatatatacacatatatacatatatacacatatacatatatgcatatatacacatatatacacatatacatatatgcatatatacacatatatacatatatacacatatacatatatgtatatatacacatatacgtatatgtgtatatatacacatatacgtatatgtatatatacatatatgtatatgtatatatacacatatacacatgtatatatacacatatacacatgtatatatacacatatgtatatatacacatatacacatatgtatatatacacatatacacatatatacacatatgtatatatacacatatacatatatgtatatatacacatatgtatatatacacatatacatatatgtatatatacacatatacatatatgtatatatacacatatacatatatgtatatatacacatatacacatatacacatacatatatgtgtatcta

SEQ ID NO: 438 - protein, 557 aa, Homo sapiens [sequence omitted]

SEQ ID NO: 439 - DNA, 1674 bp, Homo sapiens
  source 1..1674: mol_type = genomic DNA
atgccacctcctcgcctcctcttcttcctcctcttcctcacccccatggaagtcaggcccgaggaacctctagtggtgaaggtggaaggtgagggagataacgctgtgctgcagtgcctcaaggggacctcagatggccccactcagcagctgacctggtctcgggagtccccgcttaaacccttcttaaaactcagcctggggctgccaggcctgggaatccacatgaggcccctggcatcctggcttttcatcttcaacgtctctcaacagatggggggcttctacctgtgccagccggggcccccctctgagaaggcctggcagcctggctggacagtcaatgtggagggcagcggggagctgttccggtggaatgtttcggacctaggtggcctgggctgtggcctgaagaacaggtcctcagagggccccagctccccttccgggaagctcatgagccccaagctgtatgtgtgggccaaagaccgccctgagatctgggagggagagcctccgtgtgtcccaccgagggacagcctgaaccagagcctcagccaggacctcaccatggcccctggctccacactctggctgtcctgtggggtaccccctgactctgtgtccaggggccccctctcctggacccatgtgcaccccaaggggcctaagtcattgctgagcctagagctgaaggacgatcgcccggccagagatatgtgggtaatggagacgggtctgttgttgccccgggccacagctcaagacgctggaaagtattattgtcaccgtggcaacctgaccatgtcattccacctggagatcactgctcggccagtactatggcactggctgctgaggactggtggctggaaggtctcagctgtgactttggcttatctgatcttctgcctgtgttcccttgtgggcattcttcatcttcaaagagccctggtcctgaggaggaaaagaaagcgaatgactgaccccaccaggagattcttcaaagtgacgcctcccccaggaagcgggccccagaaccagtacgggaacgtgctgtctctccccacacccacctcaggcctcggacgcgcccagcgttgggccgcaggcctggggggcactgccccgtcttatggaaacccgagcagcgacgtccaggcggatggagccttggggtcccggagcccgccgggagtgggcccagaagaagaggaaggggagggctatgaggaacctgacagtgaggaggactccgagttctatgagaacgactccaaccttgggcaggaccagctctcccaggatggcagcggctacgagaaccctgaggatgagcccctgggtcctgaggatgaagactccttctccaacgctgagtcttatgagaacgaggatgaagagctgacccagccggtcgccaggacaatggacttcctgagccctcatgggtcagcctgggaccccagccgggaagcaacctccctggggtcccagtcctatgaggatatgagaggaatcctgtatgcagccccccagctccgctccattcggggccagcctggacccaatcatgaggaagatgcagactcttatgagaacatggataatcccgatgggccagacccagcctggggaggagggggccgcatgggcacctggagcaccaggtga

SEQ ID NO: 440 - DNA, 8578 bp, Homo sapiens
  source 1..8578: mol_type = genomic DNA
ggcttatgatgtgctggacactgggctaatagtgctgaacatattgtcatttttaatcttcacaaacaatatttgtataggactgttttcttttcttttttttttttgaaacagagtctcactctggtgcccaggctggagtgcagtggtgtgatctcggctcactgcaacctccgcctcctggtttccagtgattctcctgcctcagcctcctaagtagctgggattacaggtgtgcgccaccatgcccggctaatttttttttttttttttgagaaggagtctatgtgcccagcattgttctagagcacttgcaattagtggtgaacaacacggtctctactccaaggggctcacattcttgtgcagaaaacagaaatgaacaaataaacacacaagatcatttcccgtggtagtgagagctgggatgaaaataaaacagcgtggcagggaggaggcaagtgttgtgagtctggagggttcctggagaatggggcctgaggcgtgaccaccgccttcctctctggggggactgcctgccgcccccgcagacacccatggttgagtgccctccaggcccctgcctgccccagcatcccctgcgcgaagctgggtgccccggagagtctgaccaccatgccacctcctcgcctcctcttcttcctcctcttcctcacccccatggaagtcaggcccgaggaacctctagtggtgaaggtggaaggtatgtccaaagggcagaaagggaagggattgaggctggaaacttgagttgtggctgggtgtccttggctgagtaacttaccctctctgagcctccattttcttatttgtaaaattcaggaaagggttggaaggactctgccggctcctccactcccagcttttggagtcctctgctctataacctggtgtgaggagtcggggggcttggaggtcccccccacccatgcccacacctctctccctctctctccacagagggagataacgctgtgctgcagtgcctcaaggggacctcagatggccccactcagcagctgacctggtctcgggagtccccgcttaaacccttcttaaaactcagcctggggctgccaggcctgggaatccacatgaggcccctggccatctggcttttcatcttcaacgtctctcaacagatggggggcttctacctgtgccagccggggcccccctctgagaaggcctggcagcctggctggacagtcaatgtggagggcagcggtgagggccgggctggggcaggggcaggaggagagaagggaggccaccatggacagaagaggtccgcggccacaatggagctggagagaggggctggagggattgagggcgaaactcggagctaggtgggcagactcctggggcttcgtggcttcagtatgagctgcttcctgtccctctacctctcactgtcttctctctctctgcgggtctttgtctctatttatctctgtctttgagtctctatctctctccctctcctgggtgtctctgcatttggttctgggtctcttcccaggggagctgttccggtggaatgtttcggacctaggtggcctgggctgtggcctgaagaacaggtcctcagagggccccagctccccttccgggaagctcatgagccccaagctgtatgtgtgggccaaagaccgccctgagatctgggagggagagcctccgtgtctcccaccgagggacagcctgaaccagagcctcagccagggtatggtgatgactggggagatgccgggaagcgggggtccagagacagaggggaggggaaactgaagaggtgaaaccctgaggatcaggctttccttgtcttatctctccctgtcccagacctcaccatggcccctggctccacactctggctgtcctgtggggtaccccctgactctgtgtccaggggccccctctcctggacccatgtgcaccccaaggggcctaagtcattgctgagcctagagctgaaggacgatcgcccggccagagatatgtgggtaatggagacgggtctgttgttgccccgggccacagctcaagacgctggaaagtattattgtcaccgtggcaacctgaccatgtcattccacctggagatcactgctcggccaggtagagtttctctcaactgggaggcatctgtgtgggggtactgggaagaagtggaagccagtcaatcttagattcccccaacccgagggctactcccagcctcaccccaaaccccaacttccacacagaacactgactccaagtctttcttttttttgacagagtctcgctctgttgcctaggctggagtgcagtggtgccatcttgtcttggctcactgcaacctccgcctcccaggttcaagtgattcccctgcctcagcctcctgagtagctgggattacaggtgcccaccaccacgcctggctaattttttttttttttttgagacggagtcttgcactgtcacccaggctggagtgcagtggcacgatctcagctcactgcaacctccaccttccaggttcaagtgattctcctgcctcagcctcccgagtagctgggattaaagcctggctaattttttttgtatttttagtagagatggggtttcattatgttggccaggctggtctcaaactcctgacctcgtgatccacccgcctcggcctcccaaagtgctgggattacagacatgagccacagggccgggccaagcctaattttgtatttttagtagagatggggtttctccctgttggaccaggctggtcttgaactcctgacttcaggtgatctgcctgccttggcctcccaaagtactgggattacaggcataagccaccgcacctggcctagacttcaagtctttcttccctcgcttccaagacactacttttctgggtcttcacctaccattgcttgcgcctgcccaccagcttgggtggagtcttccttcctccccaactcctcactcttggagccctgggccctcttcttatccctgtctgcacactttcctatttgaacttgactctcaatggcttcttgggtcaccatgccttggtgactctattccaggctccatactcagccatctcctgtgccatttgatatcccatggacacctcaggctcaacagatacaaaatcaaactcaatgtcttccccaagtatagtcttcttggtggcccagtgtaagcagagggcaccaccacctgctccctcgcccaggctaagaacctgggcatccttctttttcctcaccccgtccaacaaactggtcacagtgttctgccaattctctctccatgcaatcctatcatgctatcctaactgcaattcacaaacccaaccccaactttcactccaaacttgatccaagcaatgtgctggatcccaactgtaaccttgcaaactcaactctgcccttcactttgaccgtgactatccttaattgcagcaggaaactgatcattatgctcccctcaatccacacattgcctctgagtacagccatggtttgtccacgatttgctcaaagacactgccccatgtcctgtgccagggtctgtgacaatccctgacctcctgggacatggctccttagagagaggagagcctttctcacagcttgggactttgagtctgtgtctttttttttttcttgagacggagttttgctgtggttgcccaggctggagtgcagtgatctcggctcactgaaacctccgcctcccgggttcaaacgattctcctgcctcagcctcccaagtagctgggattacaggcacccaccaccatgcccagctaatttttttgtatttttagtagagatggggtttcaccatgttggccaggctggtctcgaactcctgacctcaggtgatccacccgcctttgcctcccaaagtgctgggattacaggcgtcaaccaccgcgcccggccgagtctgtgtcttgcctctgtgcctcagacttgcggttccttgagatctcaggattgggacgtaagatgccagcctggggtcctcgtctcatagccccttccccctagtactatggcactggctgctgaggactggtggctggaaggtctcagctgtgactttggcttatctgatcttctgcctgtgttcccttgtgggcattcttcatcttcaaagaggtgagtcatgtccccagtgggtctgtccaaaccctactccatcttccccaggataagccggctctggccagtctgacaaccatctttctttcctcccatccctcccttcaagaccccagaatcctgttctccccagtcttcctctagcctccctcaaacttcccaagcctcttgcaattttttttttttttttgagacagggtctcattctgtcaccccagctggagtgcagtggcacaatctgagctcactgtaacctctgcctcccaggcttaagtgattcttgtgcttcagcctcccgagtacctgggactacaagtgtatgccaccacacccggccaattttttatatttttagtagagacgaggtttcaccatgttggccagactggtctcgaactcttgacctcaaatgatccgcccacctcggcctcccaaagtgctgggattacaggcacgagccaccgcgcccgtccgcctcgcaatttgaactcctgtctcctttgttgaaccaagtgacctccccagcacctggccccacaaatcctcaccctgccaagcagcccctcctctgatcacgccctttaactcccaccagccctggtcctgaggaggaaaagaaagcgaatgactgaccccaccaggaggtaatgcaaccagtgcaccccgcggtaacaccctccaccttcactttatgccttgcacttactgtttcctctgcccaggggttctttgctccgtctctactgtttcaaatactgcccaacctcaaagcccagctccaaagctacctcctctgtgaagaactccttggaaatgatcatctcagactcctctattggctgtcccagcacaagtgatcacgtttaacttctgaaggcctggacagaatcttgagtgggtccgccattccattccaagtcggccctcaccgtgcacttcctcttctcccgccagattcttcaaagtgacgcctcccccaggaagcgggccccagaaccagtacgggaacgtgctgtctctccccacacccacctcaggcctcggtaagaggcaccgcccctccagcctatagctccgccccagatccggggctccacccccactctcctcatccctccaatccgctgtgcgccaagccttctggagctcggaactccgcccccggggcggggagtcccgcccagctatgagccccgcctctagaaccagaccccgcctccagggctcagagccacgcccccaggacccagagcctgaagtcgtaatcaagagcagaacttcgccccagaactgaaggcctcggccctagatttagattccgccccagggttcaaggccgggttcctagacccagagtccattcgcagagcccaaaacatcctcttcccgtgccccgccgcgcggacccttagccttgaccgcccccatctcttctgaccccgtcttacaatgcccctctcaccaggacgcgcccagcgttgggccgcaggcctggggggcactgccccgtcttatggaaacccgagcagcgacgtccaggcggatggagccttggggtcccggagcccgccgggagtgggtgaatgactgggagagggaagggtcgttccccacatggagggggttggagcggtctgtggcccgaatagtggactgggccctggaggagagggggcatgactcggttccccatccccatccccaaacccccaggcccagaagaagaggaaggggagggctatgaggaacctgacagtgaggaggactccgagttctatgagaacgactccaaccttgggcaggaccagctctcccagggtaaggctgccctcccccgtggccccccacctctgcggtggcctgtggactcccatggacacccctccttctccaccagatggcagcggctacgagaaccctgaggatgagcccctgggtcctgaggatgaagactccttctccaacggtaacttggggcctttgtgggacctcagagacttaggtgtaattgcagcgctgtgacactcctagaaggggtccctggagttctctctcttctgccacagctgagtcttatgagaacgaggatgaagagctgacccagccggtcgccaggacaatgggtgtgtgtgaggatggcaacagtccaggggggaggcggaggacacctggaggccaggaggaatagtaacctccctcttccctttccagacttcctgagccctcatgggtcagcctgggaccccagccgggaagcaacctccctgggtgagagatgctttcaatcagactgccttgcccagcttgggtgacctggcctcagctctgacaccagatccaactttgacctgaccctgaccccaaacccgaacccaatcctgtgactcctctcacctcaacactgagccccatcccccatcctgagccccatcccccatcctgacccccaatatttaccccctccctaactgtgaatatcaacaccgatcccaatgcagtatcagcctggacttgatctccacctcacctcagccccagtgcagacctcaacttggaccccagcttactctgcagcttcttcatgactctgactccgactccctccagtttcttctttttctttttcttttttttgagacggagtctccctctgttgcccaggctggagtgcagttgccacctctgcctcctaggttcaagcgattctcatgcctcagcctcctgagtagctgggattatagacgtttgccaccacacctggctaatttttgtattttcagtagagacagggtttcgccatgttggccagactggtctccaactcctggcctctagtgatctgcccgccttggcttcccaaagtgctgggattacaggcatgagccaccacgcccagcccagttctgttcttgaccccttccttagccataatctaacccatatctaaccctgaccctacagctaactggggccccaaactcaatgctaaccaaatcaccccttcccagcacagcatgggtaatgctcctcaccttcctctgcccctcagtcttcctccttaccgtaggctgtacttcccatgccctagcctccaattctccatcccccgcccaagcagggtcccagtcctatgaggatatgagaggaatcctgtatgcagccccccagctccgctccattcggggccagcctggacccaatcatgaggaaggtgggtgcttctgccgctgtcccctgctgtcccctgggctgactttgccttccagcctacttccagtgccacccatgttctcctcctccctggtcctatccagatgcagactcttatgagaacatggataatcccgatgggccagacccagcctggggaggagggggccgcatgggcacctggagcaccaggtgatcctcaggtggccaggtgagctgggactgcccctagggaaagcggggagggagggagataggcacggatggcagtggctgctggctttcagggagggagagggaacagggttcctagggcctggtgggcagggggaggactgctggacccctccccatcaccgtttcttctgcatagcctggatctcctcaagtccccaagattcacacctgactctgaaatctgaagacctcgagcagatgatgccaacctctggagcaatgttgcttaggatgtgtgcatgtgtgtaagtgtgtgtgtgtgtgtgtgtgtgtatacatgccagtgacacttccagtcccctttgtattccttaaataaactcaatgagctcttccaatcctatgaagtagtgccattgtgtgggaaggaagggaaggaaaggaaaggaaggaaagggaagggaaggaaaggaagggaaggaaaggcgtcttgaatcccatggaagagggagggctgccttctgcatacaaagggccttttcccggtgcggtggcccacacttgtaatctcagcactttaggaggccaagcaggtggatcatttgaggtcaggagttcgagaccagcctggtcaacctggtgaaaccccgtctctactaaaaatacaaaaattagctgggtgtggtggcgagcctgtagtcccagctacttgggaggctgaggttggagaatcacttgaacctgggaggcagaggttgcagtgagtggagatggtgccattacacttcagcctgggcgacagagcgagacttcgtctcaacaaaaaataaaaataaaaataaaacaaagggcctttccccttccatggcctagccttcacctactgccctcttttgcccgctgcccacagatccgtcacgatcagccccctcccaccatccagctacccaattatcattaattcagcagttacatgctgggtgcccagtggagaaaca

SEQ ID NO: 441 - protein, 297 aa, Homo sapiens
MTTPRNSVNGTFPAEPMKGPIAMQSGPKPLFRRMSSLVGPTQSFFMRESKTLGAVQIMNGLFHIALGGLLMIPAGIYAPICVTVWYPLWGGIMYIISGSLLAATEKNSRKCLVKGKMIMNSLSLFAAISGMILSIMDILNIKISHFLKMESLNFIRAHTPYINIYNCEPANPSEKNSPSTQYCYSIQSLFLGILSVMLIFAFFQELVIAGIVENEWKRTCSRPKSNIVLLSAEEKKEQTIEIKEEVVGLTETSSQPKNEEDIEIIPIQEEEEEETETNFPEPPQDQESSPIENDSSP

SEQ ID NO: 442 - DNA, 893 bp, Homo sapiens
  source 1..893: mol_type = genomic DNA
tgacaacacccagaaattcagtaaatgggactttcccggcagagccaatgaaaggccctattgctatgcaatctggtccaaaaccactcttcaggaggatgtcttcactggtgggccccacgcaaagcttcttcatgagggaatctaagactttgggggctgtccagattatgaatgggctcttccacattgccctggggggtcttctgatgatcccagcagggatctatgcacccatctgtgtgactgtgtggtaccctctctggggaggcattatgtatattatttccggatcactcctggcagcaacggagaaaaactccaggaagtgtttggtcaaaggaaaaatgataatgaattcattgagcctctttgctgccatttctggaatgattctttcaatcatggacatacttaatattaaaatttcccattttttaaaaatggagagtctgaattttattagagctcacacaccatatattaacatatacaactgtgaaccagctaatccctctgagaaaaactccccatctacccaatactgttacagcatacaatctctgttcttgggcattttgtcagtgatgctgatctttgccttcttccaggaacttgtaatagctggcatcgttgagaatgaatggaaaagaacgtgctccagacccaaatctaacatagttctcctgtcagcagaagaaaaaaaagaacagactattgaaataaaagaagaagtggttgggctaactgaaacatcttcccaaccaaagaatgaagaagacattgaaattattccaatccaagaagaggaagaagaagaaacagagacgaactttccagaacctccccaagatcaggaatcctcaccaatagaaaatgacagctctccttaa

SEQ ID NO: 443 - DNA, 894 bp, Homo sapiens
  source 1..894: mol_type = genomic DNA
atgacaacacccagaaattcagtaaatgggactttcccggcagagccaatgaaaggccctattgctatgcaatctggtccaaaaccactcttcaggaggatgtcttcactggtgggccccacgcaaagcttcttcatgagggaatctaagactttgggggctgtccagattatgaatgggctcttccacattgccctggggggtcttctgatgatcccagcagggatctatgcacccatctgtgtgactgtgtggtaccctctctggggaggcattatgtatattatttccggatcactcctggcagcaacggagaaaaactccaggaagtgtttggtcaaaggaaaaatgataatgaattcattgagcctctttgctgccatttctggaatgattctttcaatcatggacatacttaatattaaaatttcccattttttaaaaatggagagtctgaattttattagagctcacacaccatatattaacatatacaactgtgaaccagctaatccctctgagaaaaactccccatctacccaatactgttacagcatacaatctctgttcttgggcattttgtcagtgatgctgatctttgccttcttccaggaacttgtaatagctggcatcgttgagaatgaatggaaaagaacgtgctccagacccaaatctaacatagttctcctgtcagcagaagaaaaaaaagaacagactattgaaataaaagaagaagtggttgggctaactgaaacatcttcccaaccaaagaatgaagaagacattgaaattattccaatccaagaagaggaagaagaagaaacagagacgaactttccagaacctccccaagatcaggaatcctcaccaatagaaaatgacagctctccttaa

SEQ ID NO: 444 - protein, 373 aa, Homo sapiens [sequence omitted]

SEQ ID NO: 445 - DNA, 1122 bp, Homo sapiens
  source 1..1122: mol_type = genomic DNA
atgccgcggggctggaccgcgctttgcttgctgagtttgctgccttctgggttcatgagtcttgacaacaacggtactgctaccccagagttacctacccagggaacattttcaaatgtttctacaaatgtatcctaccaagaaactacaacacctagtacccttggaagtaccagcctgcaccctgtgtctcaacatggcaatgaggccacaacaaacatcacagaaacgacagtcaaattcacatctacctctgtgataacctcagtttatggaaacacaaactcttctgtccagtcacagacctctgtaatcagcacagtgttcaccaccccagccaacgtttcaactccagagacaaccttgaagcctagcctgtcacctggaaatgtttcagacctttcaaccactagcactagccttgcaacatctcccactaaaccctatacatcatcttctcctatcctaagtgacatcaaggcagaaatcaaatgttcaggcatcagagaagtgaaattgactcagggcatctgcctggagcaaaataagacctccagctgtgcggagtttaagaaggacaggggagagggcctggcccgagtgctgtgtggggaggagcaggctgatgctgatgctggggcccaggtatgctccctgctccttgcccagtctgaggtgaggcctcagtgtctactgctggtcttggccaacagaacagaaatttccagcaaactccaacttatgaaaaagcaccaatctgacctgaaaaagctggggatcctagatttcactgagcaagatgttgcaagccaccagagctattcccaaaagaccctgattgcactggtcacctcgggagccctgctggctgtcttgggcatcactggctatttcctgatgaatcgccgcagctggagccccacaggagaaaggctgggcgaagacccttattacacggaaaacggtggaggccagggctatagctcaggacctgggacctcccctgaggctcagggaaaggccagtgtgaaccgaggggctcagaaaaacgggaccggccaggccacctccagaaacggccattcagcaagacaacacgtggtggctgataccgaattgtga

SEQ ID NO: 446 - protein, 1131 aa, Homo sapiens
MRCLAPRPAGSYLSEPQGSSQCATMELGPLEGGYLELLNSDADPLCLYHFYDQMDLAGEEEIELYSEPDTDTINCDQFSRLLCDMEGDEETREAYANIAELDQYVFQDSQLEGLSKDIFIEHIGPDEVIGESMEMPAEVGQKSQKRPFPEELPADLKHWKPAEPPTVVTGSLLVGPVSDCSTLPCLPLPALFNQEPASGQMRLEKTDQIPMPFSSSSLSCLNLPEGPIQFVPTISTLPHGLWQISEAGTGVSSIFIYHGEVPQASQVPPPSGFTVHGLPTSPDRPGSTSPFAPSATDLPSMPEPALTSRANMTEHKTSPTQCPAAGEVSNKLPKWPEPVEQFYRSLQDTYGAEPAGPDGILVEVDLVQARLERSSSKSLERELATPDWAERQLAQGGLAEVLLAAKEHRRPRETRVIAVLGKAGQGKSYWAGAVSRAWACGRLPQYDFVFSVPCHCLNRPGDAYGLQDLLFSLGPQPLVAADEVFSHILKRPDRVLLILDGFEELEAQDGFLHSTCGPAPAEPCSLRGLLAGLFQKKLLRGCTLLLTARPRGRLVQSLSKADALFELSGFSMEQAQAYVMRYFESSGMTEHQDRALTLLRDRPLLLSHSHSPTLCRAVCQLSEALLELGEDAKLPSTLTGLYVGLLGRAALDSPPGALAELAKLAWELGRRHQSTLQEDQFPSADVRTWAMAKGLVQHPPRAAESELAFPSFLLQCFLGALWLALSGEIKDKELPQYLALTPRKKRPYDNWLEGVPRFLAGLIFQPPARCLGALLGPSAAASVDRKQKVLARYLKRLQPGTLRARQLLELLHCAHEAEEAGIWQHVVQELPGRLSFLGTRLTPPDAHVLGKALEAAGQDFSLDLRSTGICPSGLGSLVGLSCVTRFRAALSDTVALWESLQQHGETKLLQAAEEKFTIEPFKAKSLKDVEDLGKLVQTQRTRSSSEDTAGELPAVRDLKKLEFALGPVSGPQAFPKLVRILTAFSSLQHLDLDALSENKIGDEGVSQLSATFPQLKSLETLNLSQNNITDLGAYKLAEALPSLAASLLRLSLYNNCICDVGAESLARVLPDMVSLRVMDVQYNKFTAAGAQQLAASLRRCPHVETLAMWTPTIPFSVQEHLQQQDSRISLR

SEQ ID NO: 447 - DNA, 4657 bp, Homo sapiens
  source 1..4657: mol_type = genomic DNA
ggttagtgatgaggctagtgatgaggctgtgtgcttctgagctgggcatccgaaggcatccttggggaagctgagggcacgaggaggggctgccagactccgggagctgctgcctggctgggattcctacacaatgcgttgcctggctccacgccctgctgggtcctacctgtcagagccccaaggcagctcacagtgtgccaccatggagttggggcccctagaaggtggctacctggagcttcttaacagcgatgctgaccccctgtgcctctaccacttctatgaccagatggacctggctggagaagaagagattgagctctactcagaacccgacacagacaccatcaactgcgaccagttcagcaggctgttgtgtgacatggaaggtgatgaagagaccagggaggcttatgccaatatcgcggaactggaccagtatgtcttccaggactcccagctggagggcctgagcaaggacattttcatagagcacataggaccagatgaagtgatcggtgagagtatggagatgccagcagaagttgggcagaaaagtcagaaaagacccttcccagaggagcttccggcagacctgaagcactggaagccagctgagccccccactgtggtgactggcagtctcctagtgggaccagtgagcgactgctccaccctgccctgcctgccactgcctgcgctgttcaaccaggagccagcctccggccagatgcgcctggagaaaaccgaccagattcccatgcctttctccagttcctcgttgagctgcctgaatctccctgagggacccatccagtttgtccccaccatctccactctgccccatgggctctggcaaatctctgaggctggaacaggggtctccagtatattcatctaccatggtgaggtgccccaggccagccaagtaccccctcccagtggattcactgtccacggcctcccaacatctccagaccggccaggctccaccagccccttcgctccatcagccactgacctgcccagcatgcctgaacctgccctgacctcccgagcaaacatgacagagcacaagacgtcccccacccaatgcccggcagctggagaggtctccaacaagcttccaaaatggcctgagccggtggagcagttctaccgctcactgcaggacacgtatggtgccgagcccgcaggcccggatggcatcctagtggaggtggatctggtgcaggccaggctggagaggagcagcagcaagagcctggagcgggaactggccaccccggactgggcagaacggcagctggcccaaggaggcctggctgaggtgctgttggctgccaaggagcaccggcggccgcgtgagacacgagtgattgctgtgctgggcaaagctggtcagggcaagagctattgggctggggcagtgagccgggcctgggcttgtggccggcttccccagtacgactttgtcttctctgtcccctgccattgcttgaaccgtccgggggatgcctatggcctgcaggatctgctcttctccctgggcccacagccactcgtggcggccgatgaggttttcagccacatcttgaagagacctgaccgcgttctgctcatcctagacggcttcgaggagctggaagcgcaagatggcttcctgcacagcacgtgcggaccggcaccggcggagccctgctccctccgggggctgctggccggccttttccagaagaagctgctccgaggttgcaccctcctcctcacagcccggccccggggccgcctggtccagagcctgagcaaggccgacgccctatttgagctgtccggcttctccatggagcaggcccaggcatacgtgatgcgctactttgagagctcagggatgacagagcaccaagacagagccctgacgctcctccgggaccggccacttcttctcagtcacagccacagccctactttgtgccgggcagtgtgccagctctcagaggccctgctggagcttggggaggacgccaagctgccctccacgctcacgggactctatgtcggcctgctgggccgtgcagccctcgacagcccccccggggccctggcagagctggccaagctggcctgggagctgggccgcagacatcaaagtaccctacaggaggaccagttcccatccgcagacgtgaggacctgggcgatggccaaaggcttagtccaacacccaccgcgggccgcagagtccgagctggccttccccagcttcctcctgcaatgcttcctgggggccctgtggctggctctgagtggcgaaatcaaggacaaggagctcccgcagtacctagcattgaccccaaggaagaagaggccctatgacaactggctggagggcgtgccacgctttctggctgggctgatcttccagcctcccgcccgctgcctgggagccctactcgggccatcggcggctgcctcggtggacaggaagcagaaggtgcttgcgaggtacctgaagcggctgcagccggggacactgcgggcgcggcagctgctggagctgctgcactgcgcccacgaggccgaggaggctggaatttggcagcacgtggtacaggagctccccggccgcctctcttttctgggcacccgcctcacgcctcctgatgcacatgtactgggcaaggccttggaggcggcgggccaagacttctccctggacctccgcagcactggcatttgcccctctggattggggagcctcgtgggactcagctgtgtcacccgtttcagggctgccttgagcgacacggtggcgctgtgggagtccctgcagcagcatggggagaccaagctacttcaggcagcagaggagaagttcaccatcgagcctttcaaagccaagtccctgaaggatgtggaagacctgggaaagcttgtgcagactcagaggacgagaagttcctcggaagacacagctggggagctccctgctgttcgggacctaaagaaactggagtttgcgctgggccctgtctcaggcccccaggctttccccaaactggtgcggatcctcacggccttttcctccctgcagcatctggacctggatgcgctgagtgagaacaagatcggggacgagggtgtctcgcagctctcagccaccttcccccagctgaagtccttggaaaccctcaatctgtcccagaacaacatcactgacctgggtgcctacaaactcgccgaggccctgccttcgctcgctgcatccctgctcaggctaagcttgtacaataactgcatctgcgacgtgggagccgagagcttggctcgtgtgcttccggacatggtgtccctccgggtgatggacgtccagtacaacaagttcacggctgccggggcccagcagctcgctgccagccttcggaggtgtcctcatgtggagacgctggcgatgtggacgcccaccatcccattcagtgtccaggaacacctgcaacaacaggattcacggatcagcctgagatgatcccagctgtgctctggacaggcatgttctctgaggacactaaccacgctggaccttgaactgggtacttgtggacacagctcttctccaggctgtatcccatgagcctcagcatcctggcacccggcccctgctggttcagggttggcccctgcccggctgcggaatgaaccacatcttgctctgctgacagacacaggcccggctccaggctcctttagcgcccagttgggtggatgcctggtggcagctgcggtccacccaggagccccgaggccttctctgaaggacattgcggacagccacggccaggccagagggagtgacagaggcagccccattctgcctgcccaggcccctgccaccctggggagaaagtacttctttttttttatttttagacagagtctcactgttgcccaggctggcgtgcagtggtgcgatctgggttcactgcaacctccgcctcttgggttcaagcgattcttctgcttcagcctcccgagtagctgggactacaggcacccaccatcatgtctggctaatttttcatttttagtagagacagggttttgccatgttggccaggctggtctcaaactcttgacctcaggtgatccacccacctcagcctcccaaagtgctgggattacaagcgtgagccactgcaccgggccacagagaaagtacttctccaccctgctctccgaccagacaccttgacagggcacaccgggcactcagaagacactgatgggcaacccccagcctgctaattccccagattgcaacaggctgggcttcagtggcagctgcttttgtctatgggactcaatgcactgacattgttggccaaagccaaagctaggcctggccagatgcaccagcccttagcagggaaacagctaatgggacactaatggggcggtgagaggggaacagactggaagcacagcttcatttcctgtgtcttttttcactacattataaatgtctctttaatgtcacaggcaggtccagggtttgagttcataccctgttaccattttggggtacccactgctctggttatctaatatgtaacaagccaccccaaatcatagtggcttaaaacaacactcacattta

SEQ ID NO: 448 - DNA, 32171 bp, Homo sapiens
  source 1..32171: mol_type = genomic DNA
ctactaaaaataaaaaaataaaaaattagcggggcatgatggtgtgagtctgtagtcccagctactgggaaacagagatgggaggtttgtttgagcctgggaagttgaggctgcagtgagttatgatcacgccactgcacaccagcctgggcaacagagcaagaccctgtcaaaaaaaaaaaaaaggctatgtaacatgcccaaagtcacataattggcaaggagcagcagatctgggacttgaacataggcagattagctccaagcctatttgcttaacctctataccacaatgccttcttgctatggtaaaacatctgaaaagacctattaccctataggtcctctaaggaggcatgtcgccttcctcttagcaatactagattggctccaacagaaggctgtgggcttctctggcacatgcacctgggtaggacccagagaatatctgtggagtctgaatcaacccaaaagccaatatccatccgttcatcaggaaccccagcctacaacgcaaaagaggaaatcttcctaagtagaaataaactgtaataaattgcagaggttccctcgtcctggttttcacttcatgttttggatgctgcatgctgggtgagcggagattccaggcactggccagggcagctgccctgactccaagggctgccatgaacaacttccaggccatcctgactcaggtgagaatgctgctctccagccatcagcccagcctggtgcaggccctcttggacaacctgctgaaggaggacctcctctccagggaataccactgcactctgctccatgagcctgatagtgaggctctggccaggaagatctctttgaccctactagagaaaggagacctggatttggccctcctggggtgggcccggagtgggctgcagcccccagcagccgagaggggccccggccacagtgaccatggtggtaagttggcatcacttttaatcaaggagaaatgacagactgtagacagctcaaggattttccctcctctctgaaagggaagtcaatgggaaggcagactggtgagaaatccaagtgtctagtgagctggcaggagcagtgaaaacttggagcactgtctctgttgctgggtgtgctggagcgaacggcgtgcttcccactctgctggaaggaaccatcccaggggcacgcagccaaatgcctgcttgggttcactccctgagccctgacgatacaccaacattaacggggcatggatggacagatcagctcctgccttcaaaggggtctgctgtctagtggggaagatggatgcaggcacaatcagtgtgagtcaaaatgagagaaatggggccgggtgcactggctcacgcctgtaatcccagcattttgggaggccaaggcaggtggatcacctgagatcagttcgacaccagcctggccaacatggcaaaaccctgtctctactaaaaaatacaaaaaacagccagacatcctggtgggtgcctgtagtcccagctactcaggaggctgaggcaggagaattgcttgaactgggaaggcagaggttgcaatgagccgagatcacgctactgcactccagtctgggcaacagagcaagactccatctcaaaaaaaaaaatagagaaatggggtgcagagaaaggaggagccagagaaaaagctgaaagcagagcccactgtgtgtgttgggggggggcatgtgtgcgtttgcatgcatttgcttgtgtgtgcatgtgtgtgtctgtgtgacacacagagacagaaaccgaaagacagagggagagcgagaaaggaagggagagaaagacagacacagaaagagacagagagacaggcagagacagggagaaaagggagggagaggaaggaaggtggaggctgatggaggaagagaaaaagggagaaggtgggggaaagaaagagagagaaagagagaataagaactcgcttacgggagagagaatgaaggccttatttttaagagcgttggtggcacacaatcatctcaaaccagaaagacaagcctgcactgtcctctttccactcacatccttggctcctccaactttttacgtctcctacccacttacaaagaagtcctcccttcattgtaatgtcacaactttctttctttttttgagacggggtctgttctcttgcccaggctggagtgtagtcgcatgatcacagctcactacagcctccatttgcggtgcttaagtgatcctcccacctcagcctcccaactagctgggactacaggcatgcaccactatgcctggctaatttttttttaattattttttgtagagatgaggtctcactatgttgaccaggctgcttgcgaacccctgagctcaagcgatcctcccaccttggcctcccaaattgctgggcttacaggcatgagccaccacacccaacctggtcataactttctaaagacggtgtttgttccatctccttctgaaatgcaagtcttgagagaataacagtgattgacattgattatttagtgtgccagaaacagcctaagcgcaatctagaaccctcttacttctcccttgaccttgagccctttgatccccatccttatttaacacttaaagaagaaaacagactctgcccaggggtgacgcaacttgcccaggtcccccaggtgggaagcggtgaagactggatttgaagacagacaagctttgatcttcaacttagccttcagggcatcaaatgcattttggcggccttatcttgggcaccagggcagtgttgtttaccagctttcctgccaagacaacatttctacagggctggttcttcttgtggtcaaattctcacccaagtggtttccatcgtctattggactcctctttaattctcttcctcctaacagtcacctaggcaaaggggcatctttaccacccaaacattctcccttggcttctcaacaggggcgcagacagccagtgtggtcttgatggtggcacagatgccacctgggggagaagccagaaccttcctctctccctggctgcagcccctcctgccccagccacatgtgccttcactgccggacacttcagcccctcccaccccctctttccgagagtgctggttcctgttatttaactctgtttcctccctcgggaggtaatatatttatttctgatcccacgtgactccagaaagtggaactgcactcggggcccagtgtggtcttcggggagctgggaggggtgcagggcaagttgctcttttcctgctttctctttctgccctccagccagcttccctccagggctgccaggcttgacctgcgacagtgggcaggtgtgctgctgctgggcagctctcagaggggaagaaagaggacagggcaagagaattgcatggtttgtaaacaaagggcactgactttcattttgatgggggttcggaaaaggaaatcatccatgtggggtttttgtgaccctccctctcaaccactctataatgaccttggccctctgctgtgctaaacgctgcactggctcccacgttactcagagaaaaagctaaatctggacaatggcccacaaggcctttcctacctcatcagctccctgctctcatcccctactcctgtctgccttgttcatctactccagccatgttggcaccctcgctgttccttagacacgctcagcacactgtctgcctcagaacctttgcacatgccgttccctctgcctggagcactgttctctaagcattttcttggtcaacctcctaaattccttctattctttgcaccttatcaatgaagcctgccctgaccaagccatttagaattgcaactcctccctccacactctgagccccctccccagattgattttttccccactttttttttttttgatacagagtcttgctctatcgcccagcctggagtgcagtggtgagatctcagctcactgcaacttccatctcccaggttcatgcagttctcatgcctcagcctcccaaatagctgggattacaggtttgtgccactatgcctggctaatttttgtatttttagagacagggtttctccaagttggccaggctggtcttgaactcctgacatcaagtgatccgcccaccccacaaagtactgggataacaggcatgagccactgcgcctggctccccaccttctgtatatcttacttttgtattacgtgtgtgttgtttattgtttgaccctcccactggaaaataaactccacatggacatggatctatgttttgatcacaatatgtcccaaatacctagcacagggcctgagcacagggtaggtatgcaatatatatttgttgaatgttcagtggatggatgcgttgatgagtgggtagatggatgaatggatagttcatgtaatgccattattcctactttaccaatgagtaaactgaggcacagagaagttaatgatttgcctctggtcatgacctgaggagggagactatggggtctcatgagtcctggccaattgcagtacttcctgcaaaaaaaaaaaaaaaaaaaaaaaaaaaagtactgctttagcttcctcttctaaacaacccaaggggctaccgtaaatctaccccaaatagggtggcagtcttcaaactgaaaccagcctgatgattcagaagtccccttcagatattgcagtgccttaggtgcaattgtgcagaaagcccagttctggagatgggagcttaggggtttcgctctgtgctacactgagcaacctgtgtgcatccagccccaggaaagttccagtgagtcccaagagtcaaagtccttgccctggaggaactcaggtgcctcagtgggaagttaaagcaaacatttaggcagtccctggtcaacagtgggtcacaacatctgaacaacatctatcagaggccaaagaagggggagctaggatgggtgatgatggaaaaagaaccaggctggaggctggacagctggacagctctggatctgaagccatgttctgctccttacgtaccatgtgaccttggccacatgactagaccactcggaatctcagtttcttcatctctgaaatgggagcaatgatacgaatctcccagggctctagtgagggttaaatgagatggtaggtagaaaccttccaaggcagtgcttggcattaggtcgcactgtataaatatcagaccactctgagtctaacagcaaggagaatggaacaggaagaagataaaccaggggtttgaggcaccaagaaaaataattactgcagtctgggggccccagacaatatctagacacctaccccatgcaaaatgcagtgctgagtgcttgggtactgtgcatatttgagaaacaaatcaatgtggcccctgccctcgagttgaactggcacatgggccatgtcctcagacagcctgagtgcctgtcctgccttcccaattccaagaggtatgactttgagcacttcccgggcgccccgcctcagtttccccatctataaagtggagatgataatagcattcagagtcactgatctaagggctcagggacaccattcagtgtaagccccatacactccctgcaagaggaagctggttctgactcagccttgaggctggcgtctgaggcaaccacaagcccaacgtgcatggtggaaagatgactgtaagtgggggcaacctcagctggccttgggtttgaccatggaatgcgaggcacaaaggggcccattttgcatactttctcagaggctgtagggcacccctgccagggtcttacattttattgattcctctgactctactttgttggttgtttttgttgttctgatttcattgcgtgacatttttgcccatgaggtctcagttctaggaatgacagaacaaaggctccctctgggaagtcgcctgatttattggaaagggaggaacaccccacccttagggatcgctaagctcccttcctccagcttccttccccatctggcccttaggatgtgagaaaccagagctgtgacacaccagagaggagagaggctgtgccctctcaccttctgggcttcctttcctgagaaccagcccctgttctgattttgggagtctcctttgcctcagggagggggatgtgttggcgaggaagactcgtgcctttcatcttggactgcttctctggccctctaccccaggaaccacagaaggagacacacctgtacccggaagctggcatttccccatgggttttcccaggccagcctgttccaaacacagcttgcccccaagcctggcacttctccaaccagtcacggtttctgttctctgttgctatgaccttgagcagttcacctgcgttccttactgtctactttcccatccacctacctgcctgccctccaactttcctgatctgtgtacctaccttcctatatctacttctttttattattattatcattattctcaccctgtcttttttttaattttttttgggtgggggggacacagtcttgctttgtagcccaggctggaatgcagtggcgtgatctcagctcattataacctctgcctcccagattcaagcaattctcctgcctcagcctcccgagtagctaggattacaggcgcctgccaccatgccgagctaatttttatatttttagtagagacagggtttcatcatgttggccaggctggtctcaaactcctgacctcaagcaatccacccatctcagcttcccaaaatgctgggattataggcgtgagccactgtgcccagcctctcgccctgtcttatggtggtaatctacttctcaatttatctatttatatctactgtctacatacttatacacttatttactcatgtctacttatcagttaatccatttctctacctacctaatcacccatatatttcccatgtatttacatgtcaaagtatttccctgcattcctaccagctaagccccctttacaacaatccatcagcaggtccaggttctcatacaccctcccatgtccctccctaatttggatacatagcagttgtattctactcacctatctccctattcaccgatctctttctctccctttcttgcctcctttctttccttctcctgaatcatttatttagcacctgctagaaattatggtggactccccatccagtgctctttcaccaaaaagcatgagatgaagaaggacttttaacctagtaggggaggaatcttcatccatttggaactggaggctgccttgatcattcaaatctaaaactccattcattccttcaaatggtcttagaatagtgtatcttctattttattattttattttattttttgagacagggtcttgctctgtcgccaaggctggagcacagtggcgcaatcacagctcactacagcctcaatctcctgggctcaagacatcctcccatctcagcctcccaagtagctgggactacaggcatgcaccactatgcccggctaatttttttatttgtggtagagatgaggtctcgctatgtttcccacggctggtctcaaacttctgggctcaagcgacatacctgccttagcctcccaaagtgcagtgtgccactgcacctcgcctgataatgtgtctttcaaatgctcagtcttgtgtaggtattggggtaagtgcagaaaattaaagacctgatcctagacattaacagatgtatgatctaatcagaggtagcagagatgatgcttatgaacttgaaagttaaagttgtattgccaaataatgttgcagcaagttttgtaaaacacagcaaagcaagaaaattatagttagctggaagcgcgatgaaggtgggaactcgagctttgcaggatggctaaaatatagaccaaaagggagaaggcaggagagcagcaccgggagggagcaagctcccagcattcttccttggcttgcagggaaccaaggtgcaaaggtaggactgagcagaatctgttttgggagactgcagcaaggaccggcaatttttccagaacaactgttctttacttggaagacctagttactccccatctctccctgggacttgccaggggaccccagcatggcaaccttaatgatggttctgctgggtgctagtggttgctggcatgctagtttctgactcgagacaaataaattcagatccctagggtaagaccggcttcagcagcacctctcctgacaggggtcccgtctcaggagagaactgactttgtcccaagcagacctgggctcggggaatcctcatcacctctgcaagagttttttgttgttgctgttgttgtgttttgttgtgttttgtttttgtttttgattttttgaaatagagtctcgctctgaagcccaggctggagtgcagtggtgtgatctcggctcacttgcaacctccacctcccccaggttcaagcaattctcctgcctcagcctcccaagtaactgggattacaggcgtgcaccaccacacctggataatttttctatttttagtagagacagggtttcaccatgttggccaggctggtttcgaattcctgacctcaggtgatccgcccgcctcagtctcctaaagtgttgagattacaggcgtgagccaccacgcccggcctgcaggagtctttaagaggcaggaacaaggatgcaggtgtttcaacagagaggaagcctggggtgggcttcattcctcctcgtgctctttgcccccattcactcagtgctagaggttgtcattctgcctctgagacatccggccccctccctctccatccccacaccctcacctgccacagctgaaatccaggtgtgcctcagctcctggctgggtaccactgccactcatctgtagactctctaccctggtgccttcaggtgccaaagtgcatcctctgccatcagtcaaacacacagtttgacggatgtcacttgctctgctcagagacctgcaccgacacaggcatggtcaggttcaggtcttgtggacaagaactgggtctggaggagtcagggaagatgtagatgaggaaggtggtactgaaacgaacctctggtacagggaagatgtaccaggcagctgcagtcacccaggtgagagatggtagtcctggctggcccattctaagttccaaagctgccttggccatcggtctgagggtgggatggggggacatcagaaccagctgtctctgagaacataaagggacccccatatgggacctcaagacagctgagcagtcagaggcgcctctcccgtggcaccaggtcataggataatgagacttcttagaatttctttctttttttttcttttttttgagactgagtctcactctgtcacccacgcttgagtgcagtggcactatctaagctcactgcaacctccacctcccgggttcatgtgattctcatccctcagtctcccgagtagcacacgcaccatcacgcccaggctaatttttgtatttttagtagagaaaggattttgccacgttggccaggctggtcttcaactcctgacctcaaatgatctgcccacctcagcctcccaaaggactaggattacaggcatgagccactgtgcctggtcattcttagaatttctgacattcaccatatccgtttgttagccccactaagcaaggctgtttcaaattgactcagcatttcttatttgtcaatttctaccccactcctcacccggggacttctgaaaacagtgaaggcttcaaagtaatcaccttacaaagaagggcatcatcctcatttcacacatggggaaactgaggaccacagagaggaagtaaagaggccaaggtcacacacctgctactaagttccccgtccagtgctctttcagcaaaaatgcatgaggcacacaagtcatgtttccaaaccttcatttcagtaccaccttcatcatttttgtgttttccacataacactttactattatttatgacagggttttttttaaccactcaccttttttacttatctttcttttctttttctttaggagaggcaggatctcactctgttgcccaggctggagtgtatttcatgatcatagctcactgcagcctccaactcctgggcacactcgatcctcccacttcagcctccagagtagctgggactatagttgtgcaccatcatacatggctaatttttaaaaaatcatttgtagaaaaattagctggatgtaggagaatggcgtgaacccaggaggcggagcttgcagtgagccaagatagcgccactgcagtccagcctgggcgaaagagcgcgactccgtctcaaaaaaagaaaaaaagaaaagaaaagaaaaattagctggacatagtggcaggtgcctgtaatcccagctgctcgggaggctgaggcaggagaatcagttgaacccagaacccgggaggcggaggttgcagcgagccaagatcatgccattgcactctagcctggcaataagagtgaaactccgtctaaaaaaaaacaaaaacaaacaaaaaaaaccccaacaatttgtagacatagggtgtcactatgttgcccaggctagcctccaactcccggcttcaagcaatcctcctgcttcggcctcccaaaatgttggaattacaggcacaagccacctggcccagccatctactttatattcaaataaaactttacgtcccattataaagggaaaaaatggcaaaaacaggaggtaaccatttaacaagaaagcagagtgatgttagattatagcaagatactgttgactgtagaaggctctgaggctagagagctgctttctataaaacagagtgatcatatattagaagaggtgttaaagacatgttcacaccaagctgagacttcctccttgataccaccaggaggatgggcagagactggaaaagacactaactttctccctatgggagtcagtattatttagcatcactttggcgggtcaccccaaaccatctgactacaagggtaccatatttgggttaacactcttttggtataatttatgttttagtccaatgtcttgggatgaaaatgacaggtgggccacttatgatctccagagaaattcagggcaatttggtgtgggagtaggcatggtagaggagagcagcatctaagaagtccccagcagaggctctcagcttgtcttgaggcatctgggcggagggctatgatactggccccatcctgcagaaggtggcagatattggcagctggcaccagtgcggttccattgtgatcatcatttctgaacgtcagactgttgaaggttcccccaacagactttctgtgcaactttctgtcttcaccaaattcagtccacagtaaggaagtgaaattaatttcagaggtgtggggagggcttaagggagtgtggtaaaattagagggtgttcagaaacagaaatctgaccgcttggggccaccttgcagggagagtttttttgatgatccctcacttgtttctttgcatgttggcttagcttggcgggctcccaactggtgactggttagtgatgaggctagtgatgaggctgtgtgcttctgagctgggcatccgaaggcatccttggggaagctgagggcacgaggaggggctgccagactccgggagctgctgcctggctgggattcctacacaatgcgttgcctggctccacgccctgctgggtcctacctgtcagagccccaaggtaaaaaggccgggaaagcatcttaatttagcgtgcagtctcagctggtcctgccattccagataaacagagaaaccattctgaattggggatgggggtgaggatgggaacaggagtctgtgtcctgctggggcaggccattggaagatgtgaaagagttgtctatttccttccaccggagggagacttcaggtcagccaggtgtctggagtatgaaccatgtatcagcaccgaaaggttctagaagtcagactttcgggcagtgtgtcactaactctcagcatgctggcctggctcggcccacagcaaggtcttctcgcctccctttgggtaaatactgaggggtgcctctgcaggacgggacctctgccagactccactccatacccagagaagcagggaaaccaaaattggagtcagccttgaggtgtagctgttgagccctcagcagctggggagagctggcggatgctgccctccccccagtttcctaatggtgttgtttaaaaagggtcaggggacgggggaacagatggtgggaagagcacagtgcagacacctggcaccggctctgaaggcagcatggcagctacaccgttggctgggaagggtgtgcccctgaagaagtcgtttacattctcgagtcaattttcctggagtgtacaatggacctgtgggaaagcctgtatgaaagggtaatgatgagggacctagcacagtgtccaatattttataggaactggaattgagctcataggagctcaattttattggcattgctgttgttggatggttaaaggggtggtatcccttttctcagactcccctgaaatgtatggtttgctttgaacccagagactgatgacaggtctgccggtgtggttgggtgcagccttaagttgctacgggaaagtgttggagggggagaagtcagaggtaaccttgccccctccctcaattccagatgaggaaattcaggcctgaaaagggaaagtgaccacctcaaagtctcatgccttggaggacccagcaggaatccaagacctctgaaaaggaccggcagggctcttgccacggctgggggtgtggtcatggtaacacaggttttccatccatggaaggtacctgagggattttctcttcctccctagggccagcatcagaggagtgaatagctcagttagctcatctcaggggccatgtgccctcggaggtggtttgccactttcacggttggactgagttggagagaaacagagacccacccaggggtggggacaagctccctgcaactcaggacttgcagatcacttgcccaagtggctccctagctcctggctcctggcccggggcctgggactctccccgaagtggggctggccactgtgaggaaccgactggaggcagggacctcttggatgccccaggcagttgggatgccacttctgataaagcacgtggtggccacagtaggtgcttggttgctccacagcctggcccgagctcagcgctgcagaaagaaagtgaaagggaaaaagaactgcggggaggcggggaggtaggatgaccagcggacgagctgccacagacttgccgcggccccagagctggcgggagggagaggccaccagcagcgcgcgcgggagcccggggaacagcggtaggtgaccaaagtctcctctgtaacccctaaggtcgggctgagaatcgaggctccgagactgtcagctacttgctcaaggtcacacagcaagtctgggaggatggggggatggaatatgcaaaatgtagggccgggaaacacctcgtttccagcatccccgcaacgactctgcgcgggaaccaggagccgggaacccggagcttggcttgctgtgcccagagctccggggccgtgggcgggtggcaggaaagcctggcggcagcttctgcagagaagccggagcgcagactgggagcgcggagcagacacactcccccggccacccttggccgactccgcgcgcccgggatcctgcagaggtgcgcgcccttcttgtacgccagactttggaccagggccgccgttccctgagcttcactttccctgttgggtcatattccatctctaactctggaatcttgggtattgggctctccaggcggggggccctgctcagggaggcagtagggagccaaacctttaaccagaggatgggataagtcctcaactctcgttgaacatcttggcgaaggtgtgtgttgttgggaggggtgggggagggatccccccggactgaaccgatctcttgatctctcacttctctacctcgctttggggccctgagtcacaccctctaaggagagaggctaaagcgccccggaaagccagcgtgcgaatgccggggtgggagtgggagattggatctccctggggtccaggaaagccggaatcggagccaccatgcttagcttagtctggaactcttaaaagccgcggtcctcctgagtcccacagcccctctccaccctaggtggcacaggagaggtggcaaaagcctagaagttcaaggcatggctccctccccagccgcagcctggagtgtctaactttggcaggaagtcttccgtttctgctccccactccagagaaaaaataaataaatacttctccggagtgagattaaggaaacaggtacttcttcctcttggagaaagaggagccaaaggaacttgactccaacaaatgatcaccttgcaaacccccggctcccttaggggatgacctggtctccaacaatctcagagcgtttggaggcagggtctttggagatgactgagtggggaatcccaggctccccacacatgaacatcacctgggatgatcaacctgttcaggatgtaggttcccgggctcacccccaggcccggttggctaggcctggggtgaggctgagatcctgcaggttaaaccatctatcccaggtgactccaatgttcgtttgtggggcaaaagtccctcaagtcagagacactgggaggcgctgatgtggtctcatctctttactctctccctgttacaaaacctctatcagaaaaggagtaccaggaggtgttttgttttgttttgcttaacgccacatagcaagcagtttgcagacgcaggatttgaaccctggtctactgagagcccagcccagtgcagcaagcagatgtgaacctccacaaatgcagggcaggtcccaggcagtcagagagaaacctgttgatacccagtctgtctgatggctggggcttggtttcatgtcctaagacccagcctcagataccttgagaagagcagaatcagaaattaacccaaggaaactctggattagttccaggcaatcagggaagtggctggagggaggtaggaaacttctggacttagcctcagatttgccttgagtcacactgacaagtgacttcccctctctgaggttcatctgtaaaatggataaaacatgagagcttgcttgatgatgtctgatgtgtacagaaaaagcactttagaaaaccaccaaagaatattcatgcattgggaataattattatagatcctaaagggattgtttagaaagatcagagaggggccgggagcagtggttcacacctgtaatcctagcactttgggaggccgaggcgggtggattgcttgaggccaggagttcaagaccagcctgggcaacctggagaaaccccaactctactaaaacacttttttgtgttttagccgggcatggtggtgcacacctgtaatctcaactacttgggaggctgaggcacgagaatcacttgaacccaagaggcggagtttacccgagaggtggaggttacccgagagctgagattgcaccactgcacgccagcctgggcaacagagcaagactgtctcaggaaaaaaaaaagagagagaaaaaagtcagagaggaaagcataggcagatgggaggtttccaaagaccaagacacacacagtcaaaagacagttcagaaaggggcattagttaccaccgattctcataggaaggacatagatagttttcagattccttcaatccttctgacatcaaggacaaagtctctgattttccctgatgtttgacagtgccctaatgcttgctaagatttctttttaacaaagtggtaaagaagctgagattattttagtaacattgtttctttttcaaccacaagtgatactgttggtttggttttgcttttccgtttatacatggaaaaaaaagttttctttttgtaaaatcatggtaaaatacatataacataaaatttaccattttaaccactttcaaatgtacatttcagtggcattaaatatttcaaactgttgtgcaacctccgctaccatccatctccagaactttttcatcctcccaaactgaaactctacccaataagcaataactccccactgccccttccacccagctcgtggtaactccaacttcctgtctctatgttttgggctactctagacaccgcctataaatagaattacgtgatatttgtctttttgtgcctggcttctttcacttagcataatgtcttccaggttcatccatgtcgtgccatgtgtaattcctttctatggcggaatagtattctaatatgtggatatcccatattttgttcatccattcatttgttgatagacacttgggttgttcctacctcttgactattgtgaataatcttgctaggtacatgggtggacaaatatctgtctgactccccgctttcaactctagaaagctttcttttaaaatcggtctatttaagtttctttaaaaagttaatttaagaaaaatactaaggtaaattgtagaacaggtgatatgtcaatatgaccccaaaaattgtaaagatggaagacgaatgcctgcagtttgggaaaccggatgagaggaaagacctggaagctattgtaaaatctatgctgagggtctggtgactactagaccaagggcatggcagcagagggcagctgaaagacttcaggaaggaaagatataagaattaagaaaggggcctggtgcagtggctcatgcctgtaattccatcaccttgggaggtcaaggcaggatgatggcttgagaccaggagttcaagaccagcctgggcaacagagcaagacctttttttaggaaaaaaatatataaattaataaaaataaatttttgaaaatacagattccaggccgggcatggtggctcacacctgtaaccccagcactttgggaggctgaggccggtggatcacctgggatcaggagttcgagaccagcctgggcaacatggtgaaacaccgtctctcctaaaaatacaaaattagccgggtgtagtggtgcatgcctgtaatcccagctactcggtaggctggtggaggagaatcgcctgaacccaggaggcggagattgcggtgagccgagatcacaccattgcactccagcctgggcaacaagagtgaaactccgtctcaaaaaaaatgaaagaaaatacagattcctgggcccggctgcagactccctgaatagaatcactgggggtgaggcccaggacgctgtgtttttaacacccttcccaggtaattctcactcacagccaagcctgccgatggctggactccgtagtcagatctcagcaagcaggactggctcgtggttcatcttggggtctccagcacccagcagagtgctggcggggggactgtgttaagtagagccggatgggtcaggactggagtgtggggcctggctttgctaactgcagtcacaagatcctcatcactccaccccctaccccagcaccagggtcaggttcccttccaggaaaaacttgttggactcctttccaggtcattgactgcagttaggagtggcatgcagaagggaggctatctggagctgggacagaccaggcaagcggggaagggaactcttatcccaaccctgcattctggacagggaccgaaggtctcctggctgcagctcatacagctcatcttcattctcatcctgggaccaccaggcccctcacccacaataactttaccctttactggcaaatgcacaagctggagatgatggcccattcgagttttaagattttccaagttgttatgaggtcagtgtcctcaatcgggacccagagaagataggtggcttgcctgaactttcagagggggcatctgtggtgtcttttgtggggtcctgtaggatttccacgtccctcttggaggaaaaatagaagtaagttgtctcaggtcagattgtctgggaagccaagtaggagatggagatttgcatataggaggtttactggggacattcacaggagggaacacccgaaggaaaagggaagaaagcagggttgggaagcagcaggagttgaggtgcaatgcagtcacaacagaggtcttagccaatcccatagggagcactcaagctgggacagcaaggaagctagaccttcacatccctcatctacctccgtcctcccatacaggcatagcctcccccatgatgaacactcagcaccagactgatacatttgttataatcaatgaacctacattgatgcatcattattacccaaggtccatggtttgtttacatgagggtttactcttggtgttgtacattctgtgggtttggacagatacatgatgtaatgtatatgacattatagtatcacacagactcatttcacttgtgactgagcttgtccttctttctttaacctgcctccaactgctgagaagccctttggctagggattgcagccaattttaatttgttttccactttcctgctctgaagttactttgtttgccagaggctggttggttcaaacccaaagggcagggagctgcaatggaaatccattcaacggtgctggaattgggatggcaaaaaggagcagcaggcaggtgtcagcagggagcagctctttgcatcccacagttcccagggagcttaccattctttcattcattcattcatcctttcatttatgagacaaagtctcactctgttgcccaggttggagtgcagtggcacagtcattgctcactgcagcctcaagctcctgagctcaagccatcctcctgcctcagcctcccaagtagccgagactacaagggcactccaccacacccagctaatttttgtatcttttatttctgaagagatggggtttcactatgttgcccaggctggtctcaaactcctggcctcaagtcatcctccctcctcagcctcccaaagtgctgggattacaggtgtgatctcagacagcttacctcttaatcacctttccatctgagctggcagcagagctgggaaagtgcacccaacaccccagatgctgcaactttagtgcttcctgctccttctctgtgtggaactggcctgtttgggtacccagggccagtcccctccaagaccctctgtagaaaaagaccctactgtacacctcaattccattgcaggacaggacataattgaatcctgcctctccctgccccagtcacccatccctcccaagccattatcttgggacctgcaagggcctccaagccaagggtggcaaatccaaataccaaaggggccataatgatgtaaaatgtgtccaggcagaaggcaatagggagtagtggggcctctggtaacaattgtgtgtactctatatagagacattgtgatggtgatttagacacacacacacttatattggcttgggaaacaaaacaaataggcctatcgactggattcaacttttgattttgcagccaagcccctgtggcacagctgaggagcttgcaggtcagaaaggggatttagagccaaccaatagcaatatctccagacctctcctgacacgaagctcatctgacctcctgcccccattacacacatacacatgcacacacatgcatgcaggcacatgcacgcacgtcttctagtctccctgccttgaggacaaatgatcagatcctgcaactgtttccaggcccataagcccctgagcattgcagtgttgctacatgccttagtttcctctccgtctcctgtgacctcctcgtgccactccaggaagtgaaagtcttgagtgagaccagtagtttctcttaagtcctctctctgtctcgttctcctgggatatctacacttggtttgcaaacagcaggctggagagtgaggggcttcttcctctacatccagctcctcccccatcctgctccaagtccagcatgttcctatctcttccccaggaccctgggctcttgggcacaaatcaagccatcaccagacagcctgtggggtggcaagagcagaggtttgtttctttgtgaacatctataggtaccaggctctgtgcaggccctattgttggtgagccatagaggtaccaacctcaccccatgaatcctcctttgtttcttttcttttcaacccctgggcctttaaaccttcgattaactgcccagtgcagcccaggtcatggtacactatgatctttggttcacatgagggttttctcttcattaatgtccctatttcccatactgggtgcccattctaatgcatttcaggtgtatctttctgtttgtatgtgctcttataaaacatgttttgccttttttttttttttttagatggagtctcactctgtcacccaggctgagttttctatttttagtagagatggggttttaccaccttggccaggctggtctcaaactcctgacctcaggtgatccacccgcctcggcctcccaaagtgctggaattacaggtgcgagtcaccacgcctggccacagtttcttacttttgcattctgtactatgtttttaggatctacttgccttgcttctgatgcatttgatctttgcttctaatcacggacattgttctctatggagtgcaggggttacttttcacctgtccacacccccagtgatggacacctaggtgacctccaactctctgtcaccacaaataacacagcagtaaccatcctcagatgggttctcctggggagttgtgggaacatttcttcaggatatatagacccaagagctgaattgccaggtggtaggatctacatatccttagatattctacatgatgccaggtcgttctccagagcggccccatccatctacattcccacaaacccgtgtaaccaacacttggcatttcccagatgtctaacttttgccagttgtacagtatcaagtgtcactttgctgttttatttttggagtttacatcttagtaccacttactcgctaagtcactttaggtaagtcacaacaacccagtgacataagcactgtgccaacaaaatgcagtcgattctgtgactcagagaggttgagtaacatttgcaaagtcacacagcaagtgtggaactaagatttgaacccagagcctgcacccttaaccactatgctattattatgttttgtctctctcctaaaatatcatctgggtctacattgcaagcctctttggcagggactgtgtggtaaacctctttggggccagtaaggaactgagctcagtgactttcttacggggtgctcagtgaatcattgttttacagctttagaggggaaaagtgagagatgtttcttagagtttatctggaggactacagggtgcatgagcaaaagcggaactcatttgagctactacccccacaaagaagctgtttggggtctggtcatggtagataggcattcctaggcccctggcttcccaacaccatttggcccccggaagcagcttgtcatgaggttggggagcaggttggtgttggggggggccttgggggaaaggaaaaggagaagactgccaggcaacgaggaatcagaatctcaaaaagactcaattgaaggggctccaacactcgttgaaacggaggctcagagggctaaggtaatgtactcaggatcaaaggcagagcagaaactcaaaccatgtctctaggcacacagttcagaggtcttcccattattcctcaggaggagaagttcatggtcaagagtagggaagtattccttctcaagctttttttttttttgtctgagacagagtcttgctctgtcaccgaggctggagtgcagtggcgtgatctcggctcactgcaacctccgcctcccaggttcaagcaattttcctgcctcagcctcccaagtagctgggattataggcacccaccaccacgcccagctcatttttgtatttttgcagagacggggtttcaccatgctggtcaggctggtcttgaactcctgacctcaagtaatccgccagcctcggcctctcaaagtgctaggattataggcgtgagccaccacccctggcctccttctcatgctctttaatcacagttcagagcagtgctggaggcttttaggggtagcaaaagagccttcttctccctttcagtgcctccttagaccctcaaagatagactccccgcctctgggaagaaaacatctaatgaactggacgtaatctcagcgcctgcgtctgtaaaatggctataataacaacaatctcccagagttgccgttaacagttgaaacagaatagtaaatgcaaggcatctagcacagccccagacacagagaaatctcccctggtcactctcacagaggtaagaagcacattaataataaaaatggtcatcacgcatattgtactcaccatgcagaagttgtgctgccttaagctactgttcattgagcacttactggtcgccagtcccctttctaagggctccatgcaacttaactcccctaatcctatgagttgccaattattatcccccactttacagataaggaaactgaggctccaagtggtttaaaaaatgaacttacccagattgtagtgcgttggtaggtagggataacctgaaagttgggaaatttcaccccaaagctcaccatctgagctccattcatctcccaccagctgagatggaacgttatgctgttcccagaagagatgcatgcactgatcttcagatagtttaagtctgagttagaacattgtggcgacacctgatttccctcgggggagagagaggtgaattgttatttcagacacctgtttagtgtctacacttagcctttcaaatcctgcatgcagtgtgaagtggggatgaaaataaaccccaaaaaggacttttgatggcaaaaagatcaggaatattttctcgagttggatgtggaaggtggtggcccagggggaagcacagtttcaaagaggaccttctaaaaatactgcccatttaccaaaaagacacagaccgcgcctctgccctgcccccacatggctcctcaaaaggagaaattgtcttgccacccacgccttccctcgccggggtgctggggggccaacagcaattcaaaaaggctatagagtgggctgagactttggagatgggtagtttggttcaaatctcagcccactaatccctctgagcctgtctcttcatctgaaaaacaggaatacaaatagctgatgtgtaagttagaccaaatggggtaatgcctacgagtcatgtcatttggtacctggcacttgctggacactgtgaattctagttctatatcattgccacggatgaagagaggctgccatgcgcagaaacatgctgagagctgggagaaggtgagctagagggatacagtccctgccctcagggagagctgaagggctctctctcctgccacgggatgatcagggccatcttttccctccatcccgctctggcaatgtggtttggagaaacagtccaatgaaggggcctttgaagcacttcctaagcatctatagacataggaaacttggctctggggatagaggaaggtcccatgccaagattcaagtagatcttggtgtgactgggaggcagctgtggcgttgtggggaaacctagagtcttgggcctgaatttcagctttgacaccctctaatgtaatgggcttcctttgactgtaggcttcccacatagctggcaccccacacagaactcccttggccttctgatgatcctgcaggacaatcttttttgttttttgttttttgttttttttttgagatggtatctcactttgtcgcccaggctggagtgcagtggcgcagtcttggttcactgcagcctctgcctcccaggttcaagcgattctcctgcctcagcctcccaagtagctgggattacagaagcacgccaccatgcctggctaattttgtatttttagtagagacgggatttcaccatgttgcccgggctggtctcaaactcctgacctcaagtgatctgcctgcctcggcctcccacagtggtgggctgcaaggcaatcttcattctccagaactaatattgggaaaactgatgttcagagaggtcaagtgacttggctaaggcatcacagccagaattcagatgcaagctcctaaaccacatgaccttggacaagccatttcactgaggcgtgtgaacctcctctaagctcaaatgggcataacactctaccctgccttttccccagagctttttgggaactcagatggtgtggaggatggaggcagaagtccactgtgagctgcaaatccttgatcacccaagaggaagtgcttaaggtgcaggcttcagtcttagggaagcaggaagtggggcgctgaaatgtgtattgggggcttctgggagggggtttcttcttgtccaggttgagccaatgacgcagatcttaggccctctggtgactttttgcccaggcaacttctcagtggtggtgatggggagcgtggccagaccatccaagctgccctgctggctgtgggggccttttttttttttctgagacacagtctggctctatcacccaggctggagtgcagtggtgcaatctcagttcactgcagccttgacacctccccaggctcaagctatcctcccacctcagcctcctgagtagctggttctacagatgcacatcaccacgcccagctaagttttgtgttatttgtagagatagggcttcaccatgttgcccaggctggtctcaaactcctggactgaggtgatactcctgccttggactcccaaagtgctggaatttctacagatgtgagccaccatgcccggcctatggggcccttcttgttcctatgaagtctgcagggtccccttatgcaaaagaacagaaagctcggcttcacaaagtttgacctcggaagaaatggaagggaaagggtccctttgtcactctcacaaacgtaagaagcaaactaataatgatggccatcacacatattatactcaccatgtagaagctgtgctgccttaaacttctgttcattcagcacttactgattgccagtcccattgctaagggctccgcgtgacttaactcccctaatccttgtgagttgccaattattattcgcattttatagatatggaaactgaggctccaagtggtttaaaaaatgaacttgcccaggttacagtgtgttggtaggtaggggtagtctcaaagttggtaaattttacgccaaagctcacgatacttgccttctttcccttctcaatttatttctctgactgtgtgcttaaccacacagcagtgtcatccagagtttgaagcagagctcatcaataagtgggggtgggctaaatgtctccaggctcctccctgcggtccctcccaccatcccccatctgtgataccacctgtgtctctatgcttgagcccagacaggacaagggtgatcatttcattgggaacattttgactggggggaaagagcaccagcctgggagtcttggcagggggagtgggggagaaggggcaggggcagccaccgacaggctatgaggtcttgtgcaagtcacgtccttcccggggtctcagtcttgtcatctgcagagtgaaggaaagaggtcaagcttgaaggtccctggcagacccaatgccctgtgagaaaactgagtttgggtaacttattattttatagatatggaattatcttatagaaatgttatagatatggaatcattttatagatatggcccaaagtccaaagtcacacaactcattcacggagttgctaggatcagtctggagctcttgtcacgagatcacactgcctcaaagaggaggcagattgctgcaatgtaggttcttaataaagagcatgggtggaatgggaggcgggcatcaggcaggagctggggcaaaggtgtcttttctcactgctctgagagaacagattttgtgcctgtgtccctgaccaaggggctgggagaggtggagcatctcacccccaaccatctcccagctttggccctgctccaggaaaagggcggtggccccatctttcagttctgcttcctctagtcatggttggctgggatctcgctgcaagccggttatgtttgggttcctgcagcccccgctcaaccgtcatgaacaagtgggcccagccagtgccccagcttggactggaaagatcattctctgtgacatccgggggtctgtgctgagcctctccccaggcagtgaaagctgtggatgcgtgaaagaaaatgggtctctgggccgggtgtggtggctcacacctgtaatcccagcactttgggaggccaaggcgggtggatcacctgaggtcgggagttcgaaaccagcctgaccaacatggtgaaaccccatctttactaaaaataaaaaaattagccaggcatggtggcgggtgcctgtaatgccagctacttgggaggttgaagcaggagaattgcttgaatccgggaggcagaggttgcagtgagccaagattgcaccactgcactccagcctgggcgacagagtgagactctgtctcaaaaaaaaaaagaaaaagaaaatgagtctcaggaatggggtggcaagttgagtgtgtgttttctcatgagcttactcttcaatgtattctcttctgggcccagaacagggcagtaggagcctccctctggtcttccagcttcagggccagctctcctcttacctcctccaggaagctccctctgtttctttccagccttcatctgcatgtcatgtgtggtgggttgaaaggtggccccccaaaagatatgtccatgtcaaatccctggaacctgtcagtgtgactttatttgggaaaagggtctttgcagatagaattaagttaaggggctgggtgcagtggctcatgcctgtaatcccagcactttgggaagctgagattggaggatcacctgaggtcaggagttcaagaccagcgtggccaacatggcaaaaccccatttctactaaaaatacaaaaattagctggtcatggtggtgagcacctgtaatcccagctactcaggagactggggcaggagaatcgcttgaactgggaggtggaggttgcagtgagccgatacagcgccactgcattccagcctgggcaacagagcaagcctctgtctcaaaagaaggcaaaaaaagaattaaagatcttgaaatgacatcatcctggattatctaggtgggtcctaaatccaatgacaagtgtctttataagagaaagagacttgctacatgaggagtaggtgatgtggccactaaagctgagtttagagtgatgcagccacaagaccacaagtcaaggatcaccagtagttcccagcagctagaggaggcaaggaagcattctcccctcgagcctccagaggcagcgtggccctgctgacaccttggcttcaacttctggcctccagaaccatgagagaataaagtgctgttgttctgagctacctggatgctggtaccttgtttcagcagccctgggaaatgaatataccatggaaacatggacctgaaccacggatcctggcaggagccttagagccacacagatgagccttcagcttggctttccccagcaagagctacatgatcttgaggaagctgcttgtcttctctgggtctcaagttcttcatctgccaatggagacaataatgcttacttcctaggttttaacagctttattgagatgtaattcacatatacaatttgcccacttaaaaagtacagttcatgcctgtaatcccaacactttgggaggccgaggagacaggcggatcacttgaggtcaggagtttgagaacagcctggccaaaatggtgaaacactgtctctactaaaaatgcaaaaattagccgggtgtggtggtgggtgcctgtaatcccagctgctcaggaggctgaggcagaagaatggcttgaacctgggaggcagacgttgcagtgagccaagattgcacccctgcactccagcctgggtgacagagactccgtcttaaaaaaaaaaaaaaaaaaaaaaaaaaaaaagtagagttcagtgttcttttgggaatactcagagagttgtgtgaccatctcccatccccacagtcaattttagcacatttcatcaccccctaaagaaactccagacccatcagcagttgttccccatttccttccaaaatccctctctgccaagccctaggcaaccactaatatgctttctttcttaaaaaaaaattaatagagataggcttttgctatgttgcccaggctggtcttgaacacctgggctcaagcgattctcctgtctcagcctcccaaagtgctgggatttcaggcatgagccaccacgccccacccctcctactttatgtctccatggatttgcctgttttggtcatttcaaataaatagaatcatacaatatgtgaccctttgtgtccggcttcttcacttagcattttttttaaggttcatccatgttccagcatgtatcagtgctttctccctttaatggtggaatactttattgtatagataagcaacattttgtttatccatttattttttggtggatatttgggctgtttttatattttggctattttgaattatccttctgtgaacattcgtgtataggtttttgtgtggatatatctggtttttcttgttttcttttgttttattaatacataatatgatacatatttatggggtatatgtgaatatttattacatgcatagaaggtataatgatcatgtcaggatatttgaggtatccacatttgggattgtttaaagattaaatgaaatagtgttaaaagtatttaatatgcccttcaacaaatgatgaggaaatcttagaatctgctcagactccttcagtttacatattaggaaactgaggcacagaaaggagcagagacttgctcaagtccacccaaagcagtagagcattgtggttaaatgcaggacttcagtcagactgtctgggttcaaatcctggttccacttggacatgggtttccttacataaatcacttcacctctctgagcctcagttttctcatatgcaaagtgaggataataataataccttccttacatggttactgatatgagtattaaatgtgccagctcatgtgcctggcgtataggaggtgctttataaaccttagctgttaccactcatggcattgccaaatgtgggacgggtctcctgactctctggtgtgagattgatggaatccacactttccagttcccttttctacctcctgggtatcttctcatatggttgtaagttccttggaggaagggaatgtggcttgctctctccaccacgctgagcatataagaggtgctgaatgagcgcttttattcactcctctcatccccagccctcaccagctgggagttgttgtaggtgtcaattttctgcctctttccaacaccctgtgaggtgactgagcattgtcttccctcccaggcagctcacagtgtgccaccatggagttggggcccctagaaggtggctacctggagcttcttaacagcgatgctgaccccctgtgcctctaccacttctatgaccagatggacctggctggagaagaagagattgagctctactcaggtgggccctcctccctctggtctcttccggtatcccccacccctcagcttgctgtagagacggcaatcaggggaaattctggtccctgccctcccgtcagcaccacggacagctcccacgtctgtgggacgctctctgcagatggggatgatctcccagccctgccccgcctctccctcgttccccaccagccctctttccagaaatttccttcttcatccaagggacttttcctcccagaacccgacacagacaccatcaactgcgaccagttcagcaggctgttgtgtgacatggaaggtgatgaagagaccagggaggcttatgccaatatcggtgaggaagcacctgagcccagaaaaggacaatcaagggcaagagttctttgctgccacttgtcaatatcacccattcatcatgagccacgtcagtcccctcccacagaaatcattgcaagggggatgcggagcaatggctggaggaacggagactccagggaagagaggggagatggaggccagtgggggaaataggccccttcactaatgaccaccaagaaaacaaaatctcatgtttacatcctccacctccatttctatacgcatttctgcttcttgctcttctgtccatcctttctacaaagcccataccatacacccctttcccttttcctcccagctccttagccaagctactctagtatttgtaataactagcatttactggatactcatagtatgctcattgctgtccatacattatcatctggaatccttacaacaacaaaggaaatacatattattagtttctgtcttttacaaatgaggaaattgaggtttagagaggtgaaacgacctacccaagtttgcattagagatagtaatgtacagatctgaaattctaacctaggtctttctcgtttcaaagtctccatttttaaccacaaaaaaagaaagtgtctggggttggaagatttgctaaggcttaagcagagaagctaatttgtagccttaagaagagctacagctttcagacaagggcaggactcttggggagaggtggtggtggtgttgctgctagtggtttgttttttgggggagagacgtgggatagagaatctcttctcaccagcatcaccaccacctcatacagagcctatgttgaaatagaaaaaagtggcctttttctggaggatgcagcccctaccaggaagtaactgcttggctagcaaagtgcaagccggagtcctgcccccattttccttgttggcttgggcacctgtgtgcagtgaacaacctgcaaaactcttcttagtggtcttcttcctgccaacccaggaacagcagcattcagcagttctgtgcttgatccaaatgtggccaatttttccccagagcacagtgtattgaaaatcataccaaggaagaaaatggaggggactagtaattgttcatgtttcagaaattacagaactgagagcttgactgcttccttcccttcctggggatttacatgggggaagcagaagtgattggggctgaggacattcacatttcctcacaactggaggcagtcattaaggatttgggcatgtcataggatttgggtgtttttctccccccttagtggcatctccacaggcagcgaaagctgtctaagcaaataggtgaggcagtgcgttagtccattttttgttgcttaaaacaacatacctgacactgagtaatttataaagaaaaaaaatatttcttacagttatggaggctgagaagtccaaggttaggggctgcatctggtgagggccttcttactggtgaggactctctgcagagtcccaaggcagtgtggggcatcacgaggcaagaggtttcggtgtgatagtctctcttcctcttctcataaaaccactagtcttactcccacgacaacccattaacttattaacctgtttatccactaatccatgaacggattaacccattcatcaaggaaaagccccagtcacctcttaaaggccccacctctcaatactgccacataggggattacatttatacatgagttttggagaagacaaacattcacgtcataacaggcagcttcacccaagtctgctcctcaagtctgtgggttttctctctgcttctggaaggtgaagcccaggcctgggcaagtattcttttgcagcatcctgaaatatgaccttagcttctaaatgtgtaaaatggagataataatcacacccaccatcacgggatggttgtaagactgaataagttacaatgtgtaaagcatttagaaaaggaatttgcacagagtaagcattcagtagatgttaggtactaccccacaaccaccgttatc

SEQ ID NO: 449 - protein, 108 aa, Homo sapiens
MGVQVETISPGDGRTFPKRGQTCVVHYTGMLEDGKKFDSSRDRNKPFKFMLGKQEVIRGWEEGVAQMSVGQRAKLTISPDYAYGATGHPGIIPPHATLVFDVELLKLE

SEQ ID NO: 450 - DNA, 327 bp, Homo sapiens
  source 1..327: mol_type = genomic DNA
atgggagtgcaggtggaaaccatctccccaggagacgggcgcaccttccccaagcgcggccagacctgcgtggtgcactacaccgggatgcttgaagatggaaagaaatttgattcctcccgggacagaaacaagccctttaagtttatgctaggcaagcaggaggtgatccgaggctgggaagaaggggttgcccagatgagtgtgggtcagagagccaaactgactatatctccagattatgcctatggtgccactgggcacccaggcatcatcccaccacatgccactctcgtcttcgatgtggagcttctaaaactggaatga

SEQ ID NO: 451 - protein, 247 aa, Homo sapiens [sequence omitted]

SEQ ID NO: 452 - DNA, 744 bp, Homo sapiens
  source 1..744: mol_type = genomic DNA
atgcaaccaatcctgcttctgctggccttcctcctgctgcccagggcagatgcaggggagatcatcgggggacatgaggccaagccccactcccgcccctacatggcttatcttatgatctgggatcagaagtctctgaagaggtgcggtggcttcctgatacaagacgacttcgtgctgacagctgctcactgttggggaagctccataaatgtcaccttgggggcccacaatatcaaggaacaggagccgacccagcagtttatccctgtgaaaagagccatcccccatccagcctataatcctaagaacttctccaatgacatcatgctactgcagctggagagaaaggccaagcggaccagagctgtgcagcccctcaggctacctagcaacaaggcccaggtgaagccagggcagacatgcagtgtggccggctgggggcagacggcccccctgggaaaacactcacacacactacaagaggtgaagatgacagtgcaggaagatcgaaagtgcgaatctgacttacgccattattacgacagtaccattgagttgtgcgtgggggacccagagattaaaaagacttcctttaagggggactctggaggccctcttgtgtgtaacaaggtggcccagggcattgtctcctatggacgaaacaatggcatgcctccacgagcctgcaccaaagtctcaagctttgtacactggataaagaaaaccatgaaacgctactaa

SEQ ID NO: 453 - DNA, 4514 bp, Homo sapiens
  source 1..4514: mol_type = genomic DNA
gcattcagaaaagaggtggactctcacactaaacatttgtaactaaataagggatgttagaaattctctagaaaggaagctatgataataaatgggttgctagatgggtctagtagatggtggccatgctttgttactgccttgtgtattgtgctaccatagccctccccaaactgtactctggctcctggcatttccgtctcttcaaccagatggtcagctctctaagtgaaggagacacatctccaacatgcttggttctagcacaacagaagggctcaaacacatacctgctaaagaaactatcctgatggatttagcagcatggccatgaggcattggcggttctatcactgggaactcaggtttctggtgctccagtacctctactggctgataccacatcctacaattcacttcataggcttgggttcctgctctgggctgaataggtggtccactctgagtcatcagctgtgggtgatgatgtggtcactgcatgattctcacacaagcacccagaggacgtcatcaggcagaggcagtgggggtgggcagcatttacagaaaatctgtgatgagacaccacaaaaccagaggggaacatgaagtcactgagcctgctccacctctttcctctcccaagagctaaaagagagcaaggaggaaacaacagcagctccaaccagggcagccttcctgagaagatgcaaccaatcctgcttctgctggccttcctcctgctgcccagggcagatgcaggtgagtgaccgtctccaccctcgggggcccaaccccatcccacaggtctcctgccctttctccacattcctgatccatctatctaccaggaatgttctgaactccagctcccattctaccaagaccccccaagtgtgatgctggataagctatcagcaggaatggcagagcagcaggccattctcaagaagagccagtgggtactatcccttccccagagcccacctttgtcacctggagagtaggactttcctagaagtaaatggcagaggatgggaaactagaaaagagaaatattaaattattctagagtaggcctggcttctgtttctgggataagacaggtgcttctctcactgtctacttaggagagaaacccagagctcagctgacagcagaattggtacaatcactgtcctcagaacactgttaatgtgtttgctcagtcccattctccaactctgcttttcttccctggcctttggtggctcccctctttccaaggatgaggcactacggcaggccccagcttccctgctttctagaattccaccagcactgctctaccagccctcatccagaggctaactggagccagtccatcatgcagccatgaacatttactgggcacccactacatgtcaggctctaggaaacaggatatgacagtatctagatccctccacttacaccctggccattagaaagcagcactatcctagacaccacaggactcataagggtcttggaaactcacctgaaacaaagcaaagtcaggagaggaatgatcaggagcctctgggatttcactgtccctaagacaggtatgctcgccttcaactacatatggaagaaagatttacagaccaaagtctgctgttcttccctttttcagagcaggaaattgaagccccttcctccaggccactcccaactccaggctatcccaggctcccaaatgcccaggagttctggagccactaagcaggtgcccacccagcagattccatgggtgcccacaagcagacagacttttccttcaggggagatcatcgggggacatgaggccaagccccactcccgcccctacatggcttatcttatgatctgggatcagaagtctctgaagaggtgcggtggcttcctgatacgagacgacttcgtgctgacagctgctcactgttggggaaggtgaggagcagaaaacagcccacaccctcctggaaacactccacagagacccctgccttcttcccaaggagctccctgggctcctgtgaacacacatgccaggaggtctccttagagggtgagaaaagggcagttaagtttgtggagagaggggaaggttggttccagaggtgctgctgaagtaagaaacagcagagtgaccaagcctgccatatttagaactgggggcatactttggcatagaatacaaactgaagcaattccacctgtgtttctagggggaaccgaaccctgagaaacctggtgcaattaccagaattccaattcctggggaccgactgtccccttaatttcccctcagctgcagccctgccccagctgtcacctgctcttcactgtctctgggctgtataccctgtgactccacccccatcctcactctgctctctgtgcagctccataaatgtcaccttgggggcccacaatatcaaagaacaggagccgacccagcagtttatccctgtgaaaagacccatcccccatccagcctataatcctaagaacttctccaacgacatcatgctactgcaggtgaggcacactcctgccactcttgctcttcttggtccagttggttccactccccctggaatgccggcccttccctcctttccatcctggcctcttggttagttcctatgcctcagaggagagggaagattgtgcagccccatcactgtgtcggggcccagaagttcgttggctgacctggactttcttgcctcttccccaccagctggagagaaaggccaagcggaccagagctgtgcagcccctcaggctacctagcaacaaggcccaggtgaagccagggcagacatgcagtgtggccggctgggggcagacggcccccctgggaaaacactcacacacactacaagaggtgaagatgacagtgcaggaagatcgaaagtgcgaatctgacttacgccattattacgacagtaccattgagttgtgcgtgggggacccagagattaaaaagacttcctttaaggtaagactatgcacctgcctggattggctcttgggagaaagatgtttggggaatatctgagacctggagactcaagtagtgggggactccttcacccactagactgtgatatttctctctggaaagagaagaggggactagactgagctggggagaaattagggcctctgcaaacttaccaggaggcttatggtggatggtgcttctttggaaggatgaatttgcaacactccacccactccaggtcacagatattaggaaactgtgcccactgggggtgcagtaattataaccaggtgtgtcttcagaggctggtacccaacgtggttaatgggctggtcctccatggtggacatcagccctccttgcccacttctgggtccttaaacagccaacggtcccacatacctccgatctcaggatctgggggacatgacggaggctggcccctgggatgaggtgaagcagtaacaatgtccagggccagagcttggcagctgggggccaccagcggcctgccctgccctctggtctcccacatgtaggctgtgcaagttggccttttctaaaagggggcttgagatggaagagagggcaggacccggaggagcatcagctcagtccttccactctctattcacagggggactctggaggccctcttgtgtgtaacaaggtggcccagggcattgtctcctatggacgaaacaatggcatgcctccacgagcctgcaccaaagtctcaagctttgtacactggataaagaaaaccatgaaacgctactaactacaggaagcaaactaagcccccgctgtaatgaaacaccttctctggagccaagtccagatttacactgggagaggtgccagcaactgaataaatacctcttagctgagtggaaaagctggtttcttgtttattcattgaccctcattctcaggcaccacatctgcgctatgcaggccaatgacacaattttgctgttttctgctttctcctctcccctcaccccttgccacctccccaaacccccacatgaagctgatactcagctccttcctatccacaccagtttctccagggcctgcccttctgccaaggctgaagctgagcaccatcaggagacaacatggaccactttggtcctggggctttgggtaaacttcttacctccttctccagtgttacatgacagagaaaaaagggataataccatgggacctaactcctcatcccccactggggctcctcattctcccctgggcttagtttctctaccctcctctgagctcaaggctcagctcgtcctccagcctcttggctgccccttctcttcatccctgctgagtgttctcagaatccaccaactcttgtcctctccagaccacactgatctgatctggcccctccctcatatctacccacctaagatacccagagacccatgtggttccataagggccttgccactgagacgccagcccatctcatgccctggcagag

SEQ ID NO: 454 - protein, 144 aa, Homo sapiens [sequence omitted]

SEQ ID NO: 455 - DNA, 435 bp, Homo sapiens
  source 1..435: mol_type = genomic DNA
atgcaagacccatatgtaaaagaagcagaaaaccttaagaaatattttaatgcaggtcattcagatgtagcggataatggaactcttttcttaggcattttgaagaattggaaagaggagagtgacagaaaaataatgcagagccaaattgtctccttttacttcaaactttttaaaaactttaaagatgaccagagcatccaaaagagtgtggagaccatcaaggaagacatgaatgtcaagtttttcaatagcaacaaaaagaaacgagatgacttcgaaaagctgactaattattcggtaactgacttgaatgtccaacgcaaagcaatacatgaactcatccaagtgatggctgaactgtcgccagcagctaaaacagggaagcgaaaaaggagtcagatgctgtttcgaggtcgaagagcatcccagtaa

SEQ ID NO: 456 - DNA, 6173 bp, Homo sapiens
  source 1..6173: mol_type = genomic DNA
tagatcatttaaatttacctgtgtggcttgtattgtatttctactgggcagtgctgatctagagcaatttgaaacttgtggtagatattttactaaccaactctgatgaaggacttcctcaccaaattgttcttttaaccgcattctttccttgctttctggtcatttgcaagaaaaattttaaaaggctgcccctttgtaaaggtttgagaggccctagaatttcgtttttcacttgttcccaaccacaagcaaatgatcaatgtgctttgtgaatgaagagtcaacattttaccagggcgaagtggggaggtacaaaaaaatttccagtccttgaatggtgtgaagtaaaagtgccttcaaagaatcccaccagaatggcacaggtgggcataatgggtctgtctcatcgtcaaaggacccaaggagtctaaaggaaactctaactacaacacccaaatgccacaaaaccttagttattaatacaaactatcatccctgcctatctgtcaccatctcatcttaaaaaacttgtgaaaatacgtaatcctcaggagacttcaattaggtataaataccagcagccagaggaggtgcagcacattgttctgatcatctgaagatcagctattagaagagaaagatcagttaagtcctttggacctgatcagcttgatacaagaactactgatttcaacttctttggcttaattctctcggaaacgatgaaatatacaagttatatcttggcttttcagctctgcatcgttttgggttctcttggctgttactgccaggacccatatgtaaaagaagcagaaaaccttaagaaatattttgtaagtatgactttttaatagtacttgtttgtggttgaaaatgactgaatatcgacttgctgtagcatctctgataggctgtcatctcttgtaggcagtcattttgagatttggtgttattttgttaattattgactagatgagttccttgactaaataatctagatattgttttaaccttctgctcagtttgtatagagacttaaaagggatttatgaattttccaaaagatgggcataatatgggtatgaagcataatgatgttaataattttgtggtgggaactcattcagttgtgatagtcaaggagtatgcagattgaaaaaaatgattggttattagtttttgacttctcagactctaaggtcaagattagcattaaaaaggtaataggaaatgtttacaaattaaagtcaaaaaggtccttaaagctttggcttaaaaaaataactgataggtgattttctccaaaaagtgatttcaacattctgcttctctatctatattacttgtgaagtattccggaacttcgttgctcactgggattttggaagaattatgattctggctaaggaatgtttaaaaattttaagtgaattttttgagtttcttttaaaattttattgatggttaatgaaaagtttttacattttaaatatttcattatttgtttaaaacttagctgttataattatagctgtcataataatattcagacattcacaattgattttattcttacaacacaaaatcaaatcacacacacacacacacacacacacacactcgcacatgtttggaactatcttttaaagctcgtataataataccctacaggaaggcacagtagatgtaatagaaacctgtaccattggggggcagtattttatagtggggtggctttgctgttttttgtttttgtattttttagcctagcttgaaaatactttctttagcttactatagtttttgggacctttggagtatcagctttgttgagctcatttgtgacattgcaatttaatggttatattgggaaataaaaaagctaaaagaacataatagtctttgtctatatctcacataagccttttgggaatacttattgttagaactaagcagaagagttgaaaaggaaatcagtgaatattgtcacatctgagttcaatgaaacttgaaatatatttttaaggcaatttatgggctaattgtaaaccaattttttctttttttttttttagaatgcaggtcattcagatgtagcggataatggaactcttttcttaggcattttgaagaattggaaagaggtaagctgaatattcccatttggctaattttcctgttgcttgctttctgatggataaattcacatcatcctctgtttgtgctctttccttccaaggagagtgacagaaaaataatgcagagccaaattgtctccttttacttcaaactttttaaaaactttaaagatgaccagagcatccaaaagagtgtggagaccatcaaggaagacatgaatgtcaagtttttcaatagcaacaaaaagaaacgagatgacttcgaaaagctgactaattattcggtgaggctatttaaattctttctttggtttcattgccgagggtcttgcaaagcatttattctccagaaagtagacattagctatttaacagttgctaaagctatgaactcaactcatggctgaaactctaccttactatttccattcgtgtttgggtgactttgcaaagccagtaagagaatcgctgaagtatgtaatgtagagaaatgctggcattgtaactattgcgtaaagacaggtgagttgacaaatccagtgaagaggaagtaggtgaggaagaagcggggagtactgagaagcagttctctcattgtcccttgctcatatgatggaaattctcttactttgaatgagaggctgtctgtcttaatggaaagagcagtgggaggagctgagaagatgtgtgttctcctcccaactcagccaccaaggaactgtgatgaatcacatggctggctggggctcagtttcctcatcttaaaaggaaactgttaggctcactgtataagtttgatgaccttctttgctccaaaactctacaatgcaaagaatagaaaatgagaatgagatagaagaaagctacagtctttgaataggtaccagggacaccccactgcaagtctctagccaacctatcagattgtactgcccaattagaagcaagaatggttgctgtttgtttgtttttagggaaaaatagatagaatttataccttatgaaaagattgttctatcaactctctatcaactttcagaatatctcagctggagaactccttagactcctaagtcttacctcatgaacttgtatctttaagttatggcttctataaacagaaagataacgttgaggcataaagacaaatcatgtttttcaaaatgttttctagaagacaaaggcctctagattcctttggggttgactttgatataaatgggctcaaatgagagggaccagggtcttcaagctagcatttgtgttcttaggatatgtgctcagctttcactattgctgggcctgcctctcactcctctcatgtaagcccccagaaacagaaaggagagacatggcaacaggtctcctttggttataaactagacactcagcacttgtttctaatccagtggtgcccctggcttactgttcagtcctggataagtctcttagtttcttggtgatgatttgaacattggaaagtaaaatctgtcacttgcaaacacacagcttgtcgaaaattttttctactctgcaggaactgggccttaaaaaaatgaaaaaaaatctgtggtttcttccttctggaagctacaaacctcctgtttcttgatgggcaatcttgagtgagctctattaattattattctctttggctcagttgctaagctattttatgcatgttatgccctttgacaattagtctttagctgtaatcccccagccatcctcagaaatgtggtgagtagccatagtgttcccaagattagaaaaaatgtaatggcagagccaagaggaaggtaaatggtccacattttatgaagcatcatctaaatggccctattggttagagtgaggagatgcaagtagttcaatttgcttgcctagaaggcagggtactggaaaagttgttgcaattcttaattttaaactttatatatcagtaagccatatataaatatgattgggggtgtttattttaaaatctattatggaaattgagagactgacctaatctgggagaaattaaaaattacagttttcactcgttttggatttggtgttttctagggtacctaacctagatcagtggttctcaaacttaggtggatgtcagaatcacctggggagcttagtgaatgcacagggcacagtccttccacttcatgcacctggatctctgaggtctttgacaggtttccggattaatctgctatgcacaacagtgagaatcattgacctatagttactcatttgatgcatacaggaaagactgaagtataaagtgatataattggtagattgatgatagagaggtcatagaaacagtctcatcctcctttagatgagaaaatagaagttcagagaggttaagtagctggctcaaggtcagaattattgcatgcatgagattcaaacccacctttttatgctgactccacaaccaggagtcttttcactatataatttcaagaattctatagaagtagatttaaagatatgtgatggactccaccacattatagcacaactagaaatgtaattgtaatttttagcttcaactgctgaagaagtaaatattgtatattaaggtaatacggtccattttttaaaggaatacttttattttcactgaccatcatgacattagcagaatatcctgatggcttatatgcctgaaattaattttgctcttttctttcccgataggtaactgacttgaatgtccaacgcaaagcaatacatgaactcatccaagtgatggctgaactgtcgccagcagctaaaacagggaagcgaaaaaggagtcagatgctgtttcgaggtcgaagagcatcccagtaatggttgtcctgcctgcaatatttgaattttaaatctaaatctatttattaatatttaacattatttatatggggaatatatttttagactcatcaatcaaataagtatttataatagcaacttttgtgtaatgaaaatgaatatctattaatatatgtattatttataattcctatatcctgtgactgtctcacttaatcctttgttttctgactaattaggcaaggctatgtgattacaaggctttatctcaggggccaactaggcagccaacctaagcaagatcccatgggttgtgtgtttatttcacttgatgatacaatgaacacttataagtgaagtgatactatccagttactgccggtttgaaaatatgcctgcaatctgagccagtgctttaatggcatgtcagacagaacttgaatgtgtcaggtgaccctgatgaaaacatagcatctcaggagatttcatgcctggtgcttccaaatattgttgacaactgtgactgtacccaaatggaaagtaactcatttgttaaaattatcaatatctaatatatatgaataaagtgtaagttcacaactacttatgctgtgttggactttttctaagtgagacctggagtgaaagaactacctattaatgaattagtagggaggggagtcttcttagctgtggaaattttagagttgcatttggttccattaaatgtggtatttctttccactagcattttgttggctttcgcttttccagttagcagctctttgaattatctttctaagatacagatttaattatgtcactattcaattcagaggttctgctatggaatgtagtttaaactgcttagcttggcacacagagatttatttctagccccttctccaccttcctatttcctccttcatttcagaatcttcctctccctcatccaatgctggcaaacaccagtgggggtggagtagtgggtgtaagctctagggagaaggcttggattggaatccaagttattccattacaagtagtgtgacctttaatacattatgtatattgtctaagtttcagctttattgtctgaaaaagaaaaataattgtgtgttcctcataatattgtggtacgaattgattctttcactcaagaaatatttactggagtacctactacatgcctggtgctgttgt

SEQ ID NO: 457 - protein, 153 aa, Homo sapiens
MYRMQLLSCIALSLALVTNSAPTSSSTKKTQLQLEHLLLDLQMILNGINNYKNPKLTRMLTFKFYMPKKATELKHLQCLEEELKPLEEVLNLAQSKNFHLRPRDLISNINVIVLELKGSETTFMCEYADETATIVEFLNRWITFCQSIISTLT

SEQ ID NO: 458 - DNA, 462 bp, Homo sapiens
  source 1..462: mol_type = genomic DNA
atgtacaggatgcaactcctgtcttgcattgcactaagtcttgcacttgtcacaaacagtgcacctacttcaagttctacaaagaaaacacagctacaactggagcatttactgctggatttacagatgattttgaatggaattaataattacaagaatcccaaactcaccaggatgctcacatttaagttttacatgcccaagaaggccacagaactgaaacatcttcagtgtctagaagaagaactcaaacctctggaggaagtgctaaatttagctcaaagcaaaaactttcacttaagacccagggacttaatcagcaatatcaacgtaatagttctggaactaaagggatctgaaacaacattcatgtgtgaatatgctgatgagacagcaaccattgtagaatttctgaacagatggattaccttttgtcaaagcatcatctcaacactaacttga

SEQ ID NO: 459 - protein, 777 aa, Homo sapiens
MDSKESLTPGREENPSSVLAQERGDVMDFYKTLRGGATVKVSASSPSLAVASQSDSKQRRLLVDFPKGSVSNAQQPDLSKAVSLSMGLYMGETETKVMGNDLGFPQQGQISLSSGETDLKLLEESIANLNRSTSVPENPKSSASTAVSAAPTEKEFPKTHSDVSSEQQHLKGQTGTNGGNVKLYTTDQSTFDILQDLEFSSGSPGKETNESPWRSDLLIDENCLLSPLAGEDDSFLLEGNSNEDCKPLILPDTKPKIKDNGDLVLSSPSNVTLPQVKTEKEDFIELCTPGVIKQEKLGTVYCQASFPGANIIGNKMSAISVHGVSTSGGQMYHYDMNTASLSQQQDQKPIFNVIPPIPVGSENWNRCQGSGDDNLTSLGTLNFPGRTVFSNGYSSPSMRPDVSSPPSSSSTATTGPPPKLCLVCSDEASGCHYGVLTCGSCKVFFKRAVEGQHNYLCAGRNDCIIDKIRRKNCPACRYRKCLQAGMNLEARKTKKKIKGIQQATTGVSQETSENPGNKTIVPATLPQLTPTLVSLLEVIEPEVLYAGYDSSVPDSTWRIMTTLNMLGGRQVIAAVKWAKAIPGFRNLHLDDQMTLLQYSWMFLMAFALGWRSYRQSSANLLCFAPDLIINEQRMTLPCMYDQCKHMLYVSSELHRLQVSYEEYLCMKTLLLLSSVPKDGLKSQELFDEIRMTYIKELGKAIVKREGNSSQNWQRFYQLTKLLDSMHEVVENLLNYCFQTFLDKTMSIEFPEMLAEIITNQIPKYSNGNIKKLLFHQK

SEQ ID NO: 460 - DNA, 2334 bp, Homo sapiens
  source 1..2334: mol_type = genomic DNA
atggactccaaagaatcattaactcctggtagagaagaaaaccccagcagtgtgcttgctcaggagaggggagatgtgatggacttctataaaaccctaagaggaggagctactgtgaaggtttctgcgtcttcaccctcactggctgtcgcttctcaatcagactccaagcagcgaagacttttggttgattttccaaaaggctcagtaagcaatgcgcagcagccagatctgtccaaagcagtttcactctcaatgggactgtatatgggagagacagaaacaaaagtgatgggaaatgacctgggattcccacagcagggccaaatcagcctttcctcgggggaaacagacttaaagcttttggaagaaagcattgcaaacctcaataggtcgaccagtgttccagagaaccccaagagttcagcatccactgctgtgtctgctgcccccacagagaaggagtttccaaaaactcactctgatgtatcttcagaacagcaacatttgaagggccagactggcaccaacggtggcaatgtgaaattgtataccacagaccaaagcacctttgacattttgcaggatttggagttttcttctgggtccccaggtaaagagacgaatgagagtccttggagatcagacctgttgatagatgaaaactgtttgctttctcctctggcgggagaagacgattcattccttttggaaggaaactcgaatgaggactgcaagcctctcattttaccggacactaaacccaaaattaaggataatggagatctggttttgtcaagccccagtaatgtaacactgccccaagtgaaaacagaaaaagaagatttcatcgaactctgcacccctggggtaattaagcaagagaaactgggcacagtttactgtcaggcaagctttcctggagcaaatataattggtaataaaatgtctgccatttctgttcatggtgtgagtacctctggaggacagatgtaccactatgacatgaatacagcatccctttctcaacagcaggatcagaagcctatttttaatgtcattccaccaattcccgttggttccgaaaattggaataggtgccaaggatctggagatgacaacttgacttctctggggactctgaacttccctggtcgaacagttttttctaatggctattcaagccccagcatgagaccagatgtaagctctcctccatccagctcctcaacagcaacaacaggaccacctcccaaactctgcctggtgtgctctgatgaagcttcaggatgtcattatggagtcttaacttgtggaagctgtaaagttttcttcaaaagagcagtggaaggacagcacaattacctatgtgctggaaggaatgattgcatcatcgataaaattcgaagaaaaaactgcccagcatgccgctatcgaaaatgtcttcaggctggaatgaacctggaagctcgaaaaacaaagaaaaaaataaaaggaattcagcaggccactacaggagtctcacaagaaacctctgaaaatcctggtaacaaaacaatagttcctgcaacgttaccacaactcacccctaccctggtgtcactgttggaggttattgaacctgaagtgttatatgcaggatatgatagctctgttccagactcaacttggaggatcatgactacgctcaacatgttaggagggcggcaagtgattgcagcagtgaaatgggcaaaggcaataccaggtttcaggaacttacacctggatgaccaaatgaccctactgcagtactcctggatgtttcttatggcatttgctctggggtggagatcatatagacaatcaagtgcaaacctgctgtgttttgctcctgatctgattattaatgagcagagaatgactctaccctgcatgtacgaccaatgtaaacacatgctgtatgtttcctctgagttacacaggcttcaggtatcttatgaagagtatctctgtatgaaaaccttactgcttctctcttcagttcctaaggacggtctgaagagccaagagctatttgatgaaattagaatgacctacatcaaagagctaggaaaagccattgtcaagagggaaggaaactccagccagaactggcagcggttttatcaactgacaaaactcttggattctatgcatgaagtggttgaaaatctccttaactattgcttccaaacatttttggataagaccatgagtattgaattccccgagatgttagctgaaatcatcaccaatcagataccaaaatattcaaatggaaatatcaaaaaacttctgtttcatcaaaagtga

SEQ ID NO: 461 - protein, 165 aa, Homo sapiens
MVNPTVFFDIAVDGEPLGRVSFELFADKVPKTAENFRALSTGEKGFGYKGSCFHRIIPGFMCQGGDFTRHNGTGGKSIYGEKFEDENFILKHTGPGILSMANAGPNTNGSQFFICTAKTEWLDGKHVVFGKVKEGMNIVEAMERFGSRNGKTSKKITIADCGQLE

SEQ ID NO: 462 - DNA, 498 bp, Homo sapiens
  source 1..498: mol_type = genomic DNA
atggtcaaccccaccgtgttcttcgacattgccgtcgacggcgagcccttgggccgcgtctcctttgagctgtttgcagacaaggtcccaaagacagcagaaaattttcgtgctctgagcactggagagaaaggatttggttataagggttcctgctttcacagaattattccagggtttatgtgtcagggtggtgacttcacacgccataatggcactggtggcaagtccatctatggggagaaatttgaagatgagaacttcatcctaaagcatacgggtcctggcatcttgtccatggcaaatgctggacccaacacaaatggttcccagtttttcatctgcactgccaagactgagtggttggatggcaagcatgtggtgtttggcaaagtgaaagaaggcatgaatattgtggaggccatggagcgctttgggtccaggaatggcaagaccagcaagaagatcaccattgctgactgtggacaactcgaataa

SEQ ID NO: 463 - protein, 288 aa, Homo sapiens
MQIPQAPWPVVWAVLQLGWRPGWFLDSPDRPWNPPTFSPALLVVTEGDNATFTCSFSNTSESFVLNWYRMSPSNQTDKLAAFPEDRSQPGQDCRFRVTQLPNGRDFHMSVVRARRNDSGTYLCGAISLAPKAQIKESLRAELRVTERRAEVPTAHPSPSPRPAGQFQTLVVGVVGGLLGSLVLLVWVLAVICSRAARGTIGARRTGQPLKEDPSAVPVFSVDYGELDFQWREKTPEPPVPCVPEQTEYATIVFPSGMGTSSPARRGSADGPRSAQPLRPEDGHCSWPL

SEQ ID NO: 464 - DNA, 867 bp, Homo sapiens
  source 1..867: mol_type = genomic DNA
atgcagatcccacaggcgccctggccagtcgtctgggcggtgctacaactgggctggcggccaggatggttcttagactccccagacaggccctggaacccccccaccttctccccagccctgctcgtggtgaccgaaggggacaacgccaccttcacctgcagcttctccaacacatcggagagcttcgtgctaaactggtaccgcatgagccccagcaaccagacggacaagctggccgccttccccgaggaccgcagccagcccggccaggactgccgcttccgtgtcacacaactgcccaacgggcgtgacttccacatgagcgtggtcagggcccggcgcaatgacagcggcacctacctctgtggggccatctccctggcccccaaggcgcagatcaaagagagcctgcgggcagagctcagggtgacagagagaagggcagaagtgcccacagcccaccccagcccctcacccaggccagccggccagttccaaaccctggtggttggtgtcgtgggcggcctgctgggcagcctggtgctgctagtctgggtcctggccgtcatctgctcccgggccgcacgagggacaataggagccaggcgcaccggccagcccctgaaggaggacccctcagccgtgcctgtgttctctgtggactatggggagctggatttccagtggcgagagaagaccccggagccccccgtgccctgtgtccctgagcagacggagtatgccaccattgtctttcctagcggaatgggcacctcatcccccgcccgcaggggctcagccgacggccctcggagtgcccagccactgaggcctgaggatggacactgctcttggcccctctga

SEQ ID NO: 465 - DNA, 10211 bp, Homo sapiens
  source 1..10211: mol_type = genomic DNA
cagttgtcattcagtagggtcacctgtgccccagcgaagggggatgggccgggaaggcagaggccaggcacctgcccccagcaggggcagaggctgtgggcagccgggaggctcccagaggctccgacagaatgggagtggggttgagcccacccctcactgcagcccaggaacctgagcccagagggggccacccaccttccccaggcagggaggcccggcccccagggagatgggggggatgggggaggagaagggcctgcccccacccggcagcctcaggaggggcagctcgggcgggatatggaaagaggccacagcagtgagcagagacacagaggaggaaggggccctgagctggggagacccccacggggtagggcgtgggggccacgggcccacctcctccccatctcctctgtctccctgtctctgtctctctctccctcccccaccctctccccagtcctaccccctcctcacccctcctcccccagcactgcctctgtcactctcgcccacgtggatgtggaggaagagggggcgggagcaaggggcgggcaccctcccttcaacctgacctgggacagtttcccttccgctcacctccgcctgagcagtggagaaggcggcactctggtggggctgctccaggcatgcagatcccacaggcgccctggccagtcgtctgggcggtgctacaactgggctggcggccaggatggttcttaggtaggtggggtcggcggtcaggtgtcccagagccaggggtctggagggaccttccaccctcagtccctggcaggtcggggggtgctgaggcgggcctggccctggcagcccaggggtcccggagcgaggggtctggagggacctttcactctcagtccctggcaggtcggggggtgctgtggcaggcccagccttggcccccagctctgccccttaccctgagctgtgtggctttgggcagctcgaactcctgggttcctctctgggccccaactcctcccctggcccaagtcccctctttgctcctgggcaggcaggacctctgtcccctctcagccggtccttggggctgcgtgtttctgtagaatgacgggtcaggctggccagaaccccaaaccttggccgtggggagtctgcgtggcggctctgccttgcccaggcatccttggtcctcactcgagttttcctaaggatgggatgagccccatgtgggactaaccttggctttacgacgtcaaagtttagatgagctggtgatatttttctcattatatccaaagtgtacctgttcgagtgaggacagttcttctgtctccaggatccctcctgggtggggattgtgcccgcctgggtctctgcccagattccagggctctccccgagccctgttcagaccatccgtgggggaggccttggcctcactctcccggatcgaggagagagggagcctcttcctgggctgcccgtgaccctgggccctctgtgtacactgtgaccacagcccgctcctggaccctctgtgcccggctggccctctgtgcccagccagcctgcacctggggatgccaaggcctggggagggtggtttcacccaggccaagcctaagacagtccctctgggccctgctgggtaccggggtgtgacaccactgggaggacaagatgaggggcacccctggggccgccctgacaccccctcgaggctcctgccccgggggtcctggtgccccttcactgtggcaggcgactgggggttccccacctcggcccctctcccggggcctgctccccggcacctgaggcagcatccttgtcagggccgtgccttcctgcctcagcgccacctcttaaggttggcccgtgggtcactcaggactcagaactggagattctgggcaaaaggcaaagagcaaagggccaaaaggcatcccagggagacgactgcgggggaaccagagggcagaggggcgctcgtcacaggggagggggagctgagcgaggcaggaggggagccgagcctctccccccgtgtcccggctcttcaggcacgccctcgggacgccaccctccccgacccaggcgggaaagataagagcaaggtgtccgcagcctgacactcgtgcctcaggtgcccgcgcttgtgccggacaagactctcacaggtggcatgcctcggtttccccactggtaacagcacagggcactcagcaaggcgcagtgggcatgactggggtcctgtgggtcctgacccagatgtggccaccccggccgcagtggtcttcattccaggatgcctcttttccctcctgatctattcactgcgttcgccattcggtcattcccggggccaccactcccacctcaggtgtgtgcttcccttgtgttttatgagatatccccaacccggctgcttattggccccgtccgagggcaggagcataaataagagcctctgctttggcgtgggaccactgtgagctccagtcagcgctgccactgctgagctctgggccttcgacaggacttggccccttactgacttctccgtgtgctttgggtcatgggtgaggacgcctcctggcaaggctgcgtcctgaggattaaatcgggtcatctgtgaaaactacccagcccagcccctgacacttttttgtttgtttcttttagtgacagggtcttgctctgtcacccaggctggagtgcagtggtgtgatctcggctcactcgacctccggggctcaagcaattctcccacctctgcctccagagtagctgggactataggcacgtgccaccctgccaggctaatttcttccattttttttagagacagggtctcgctatgttccccaggctgggctcaaatggtcctcccacctcagcctccccaagtactgggattacaggcataagccactgcatctggcctccatgacacatatttttaaagtctgatttttaaagtcaaacttttgaagtcagattttaaacggactattttgaaaaatatacaaaaacgtttaaaaacaatgaatatccctcacctagaatcaataactaagaatattgacacatttgctttggggactgggcggctggagctgccatgacaaagctccgccgaccgagtggcttttaaacagagcctgccctctcgccgactgagggctggacgtgcaggatggagctccgcagggtcggctcccctgtgctctgaggggctctgctcagcctctcccggctgtggcttaaaaacagagcctgtcctcccgccgtggggggctggacatgcaggaccgaggggccacagggtcggctccctgtgctccgagagggctctgctcagcttctcctggctggggggttttgtggccaccctctgtgttcctgggttcagaagcatcccccaggctctgccttcatctctgcacgggtgactctgtacaggaagccaggcctgctggtcaatggccacccagccctgtgccctcatcttacctagtcccagctgccgtcaccctattcctaataaggccgccttctgaggtcatggggttaggacttccacataggaatctgtggggacacggttcggcccacagcccttcccacctccacacacacacacgactgtgaggagttggaagacctcactcctcacccctgccaggtcctctagggacaagctcgctgtcctcatcccagcacagcccgtgggacggtttccttgtccctaatgggaccacggtcagagatgccgggtctggtctgggccagcaggttcctccgcccggggcaggcagccttcttctgtgcgcttctggaaagcaatgtcctgtaatgcggtctctctgcgggagcacccccaccgccacctcacaggcctgttccacagccccgggatgggctctgtctccctcctgaccctgcatagggcacagccctctctcatcaacccacgatcctacgtggatccgagagggagcacctggggaaacaatggaatcccatagaaacaccccaaatctaacttgatccaggaccagccagtggtcacttctgaatattcaccttcctagtagacactaccagccaagggaggccaggaagccttcctggaggaggtggcctgaggactggggtgaggcaggccctgcgtgggggtcgccacccagcacccccacactgggtgggagccagtctctgagactggctgggggaggtgggagagggggctgcttgaactgcagacaccgaggtctagcccccaccccacccagccagttggtggaggcaggggaggccgaggggcccagctggacctgctccccggggtggattccaaaataggggggttggggggggcggaacaggagcccagggtcctggcttgaggcccagtggctgagggctggtgcaagccagacaggaaaagggttgagcctgtcagcgccagcacagatcaagtcaggagcaggtccctccaccaatgtgtgcaaataaatagcagctaagtttccagttacaagaacaatgcacagatggtcccagggacattgcggtgtggacacacagcggccattgtcctgtcgccagcacctcgccctacagctggggggtcccttagcacttcctagccatgcagggtccctgctcacagtacccgtgatgacttctgttcctcacctgcctgtctgtcccgacagctgcatggcagccctggcctgggagatggagaccccgaggggctgcctgcggtggtggggcccctgggtccccactgcattcccagaaacccagagggcagggcatttcccctgctctgtgccgagtccacccagccccagcctaggcccagtaagggctgcagcccaccctgtcccaggctgcctcccaggagccctcttggccctgatgccagaagcccatcttcctccattcaggcaggtctctgagtgccctggcctggctgcctgctggccctgagagtcacactaccccacagccctccttggtcaaaatccactctggagtggctggaagattccccgggcccacgccgcacacgcctatgcagggagcttcccctggccggccggcagacaagggcggtctcagagagggggctcacctcagcagccccttgtgtagctggccctcgcccctgccacctctgggaacaccaccaggaagctgggggacaggcacgcaggtgaaggaggcgagcgcttgtcagccgggaggccatgggcacagagggaacagggacaccctgggtggcctcaaggtcacttcaaacccctcactcgtcccctgggagggtgcccagtgaggttggcactaggagttggtcctggtcacatgacagacccacccacctctggtgtccagccagcacgccgtgggccagcctggctgcagggacacgagggcagcagccccctcctcctctgagctggttgctccttgagtcatcaccaccgcctgccacggaggccgcctgtcccaggaagcagagggaccgcagctgtggcaaccagggcctggtctctgtgtcacctcgctggggggccgtgcccaggcctgagacggaactgagtgacagtgcactgggtctgacagtgtggggctggcgccatgtttggggaaccctgtggcatgggacctgtgggtgagccgggaaaatcaccccgttgcatggcatctcgggcctggatcttaagcgcctgtgttggtgcctccgcctggcggaagagccgcgacccccacgttgccatgcgggtatcccaagccctgaccctggcaggcatatgtttcaggaggtccttgtcttgggagcccagggtcgggggccccgtgtctgtccacatccgagtcaatggcccatctcgtctctgaagcatctttgctgtgagctctagtccccactgtcttgctggaaaatgtggaggccccactgcccactgcccagggcagcaatgcccataccacgtggtcccagctccgagcttgtcctgaaaagggggcaaagactggaccctgagcctgccaaggggccacactcctcccagggctggggtctccatgggcagccccccacccacccagaccagttacactcccctgtgccagagcagtgcagacaggaccaggccaggatgcccaagggtcaggggctggggatgggtagcccccaaacagccctttctgggggaactggcctcaacggggaagggggtgaaggctcttagtaggaaatcagggagacccaagtcagagccaggtgctgtgcagaagctgcagcctcacgtagaaggaagaggctctgcagtggaggccagtgcccatccccgggtggcagaggccccagcagagacttctcaatgacattccagctggggtggcccttccagagcccttgctgcccgagggatgtgagcaggtggccggggaggctttgtggggccacccagccccttcctcacctctctccatctctcagactccccagacaggccctggaacccccccaccttctccccagccctgctcgtggtgaccgaaggggacaacgccaccttcacctgcagcttctccaacacatcggagagcttcgtgctaaactggtaccgcatgagccccagcaaccagacggacaagctggccgccttccccgaggaccgcagccagcccggccaggactgccgcttccgtgtcacacaactgcccaacgggcgtgacttccacatgagcgtggtcagggcccggcgcaatgacagcggcacctacctctgtggggccatctccctggcccccaaggcgcagatcaaagagagcctgcgggcagagctcagggtgacaggtgcggcctcggaggccccggggcaggggtgagctgagccggtcctggggtgggtgtcccctcctgcacaggatcaggagctccagggtcgtagggcagggaccccccagctccagtccagggctctgtcctgcacctggggaatggtgaccggcatctctgtcctctagctctggaagcaccccagcccctctagtctgccctcacccctgaccctgaccctccaccctgaccccgtcctaacccctgacctttgtgcccttccagagagaagggcagaagtgcccacagcccaccccagcccctcacccaggccagccggccagttccaaaccctggtggttggtgtcgtgggcggcctgctgggcagcctggtgctgctagtctgggtcctggccgtcatctgctcccgggccgcacgaggtaacgtcatcccagcccctcggcctgccctgccctaaccctgctggcggccctcactcccgcctccccttcctccacccttccctcaccccaccccacctccccccatctccccgccaggctaagtccctgatgaaggcccctggactaagaccccccacctaggagcacggctcagggtcggcctggtgaccccaagtgtgtttctctgcagggacaataggagccaggcgcaccggccagcccctggtgagtctcactcttttcctgcatgatccactgtgccttccttcctgggtgggcagaggtggaaggacaggctgggaccacacggcctgcaggactcacattctattatagccaggaccccacctccccagcccccaggcagcaacctcaatccctaaagccatgatctggggccccagcccacctgcggtctccgggggtgcccggcccatgtgtgtgcctgcctgcggtctccaggggtgcctggcccacgcgtgtgcccgcctgcggtctctgggggtgcccggcccacatatgtgcctgcctgcggtctccaggtgtgcccggcccatgcgtgtgcccacctgcgagggcgtggggtgggcttggtcatttcttatcttacattggagacaggagagcttgaaaagtcacattttggaatcctaaatctgcaagaatgccagggacatttcagagggggacattgagccagagaggaggggtggtgtccccagatcacacagagggcagtggtgggacagctcagggtaagcagctcatagtggggggcccaggttcggtgccggtactgcagccaggctgtggagccgcgggcctccttcctgcggtgggccgtggggctgactccctctccctttctcctcaaagaaggaggacccctcagccgtgcctgtgttctctgtggactatggggagctggatttccagtggcgagagaagaccccggagccccccgtgccctgtgtccctgagcagacggagtatgccaccattgtctttcctagcggaatgggcacctcatcccccgcccgcaggggctcagctgacggccctcggagtgcccagccactgaggcctgaggatggacactgctcttggcccctctgaccggcttccttggccaccagtgttctgcagaccctccaccatgagcccgggtcagcgcatttcctcaggagaagcaggcagggtgcaggccattgcaggccgtccaggggctgagctgcctgggggcgaccggggctccagcctgcacctgcaccaggcacagccccaccacaggactcatgtctcaatgcccacagtgagcccaggcagcaggtgtcaccgtcccctacagggagggccagatgcagtcactgcttcaggtcctgccagcacagagctgcctgcgtccagctccctgaatctctgctgctgctgctgctgctgctgctgctgcctgcggcccggggctgaaggcgccgtggccctgcctgacgccccggagcctcctgcctgaacttgggggctggttggagatggccttggagcagccaaggtgcccctggcagtggcatcccgaaacgccctggacgcagggcccaagactgggcacaggagtgggaggtacatggggctggggactccccaggagttatctgctccctgcaggcctagagaagtttcagggaaggtcagaagagctcctggctgtggtgggcagggcaggaaacccctccacctttacacatgcccaggcagcacctcaggccctttgtggggcagggaagctgaggcagtaagcgggcaggcagagctggaggcctttcaggcccagccagcactctggcctcctgccgccgcattccaccccagcccctcacaccactcgggagagggacatcctacggtcccaaggtcaggagggcagggctggggttgactcaggcccctcccagctgtggccacctgggtgttgggagggcagaagtgcaggcacctagggccccccatgtgcccaccctgggagctctccttggaacccattcctgaaattatttaaaggggttggccgggctcccaccagggcctgggtgggaaggtacaggcgttcccccggggcctagtacccccgccgtggcctatccactcctcacatccacacactgcacccccactcctggggcagggccaccagcatccaggcggccagcaggcacctgagtggctgggacaagggatcccccttccctgtggttctattatattataattataattaaatatgagagcatgctaaggagttctgtcctgtctggtggctgtgggggcagtgggcaggagggagggaggcctccagggagggacaaggcggcagccaggctgaggctgtgtgtggagggtgctggtggctcccctggatcctggcctgagtcaggccttcccctcgctgtcccagaaacacacaggccctcctcgccctgtttgccccactcacatgtagagccctccggtgaaaaattcctccaacatcacggggctggggacaccatcttccccaagcccaggccttttaggggggtcccacggccccctggccccaggcttcctggccaggcatgggtgtccctgagtgactgtgcctgctccatagcccccgtgtccccatgcctaccagtccctccgggcaggggtggtacctggtgccagggcgtccacagcggggtgggagggctgccctgggctatgagggacacagcatctgcgggtccctccctaagtacacagggtgggggcagcgggggaggcggggtcacgtctgctggagccctatcaccctgctgcggtccttggcagctagcagcagggacggtgcagggaaaggagccctgccaggccc

SEQ ID NO: 466 - protein, 233 aa, Homo sapiens
MSTESMIRDVELAEEALPKKTGGPQGSRRCLFLSLFSFLIVAGATTLFCLLHFGVIGPQREEFPRDLSLISPLAQAVRSSSRTPSDKPVAHVVANPQAEGQLQWLNRRANALLANGVELRDNQLVVPSEGLYLIYSQVLFKGQGCPSTHVLLTHTISRIAVSYQTKVNLLSAIKSPCQRETPEGAEAKPWYEPIYLGGVFQLEKGDRLSAEINRPDYLDFAESGQVYFGIIAL

SEQ ID NO: 467 - DNA, 702 bp, Homo sapiens
  source 1..702: mol_type = genomic DNA
atgagcactgaaagcatgatccgggacgtggagctggccgaggaggcgctccccaagaagacaggggggccccagggctccaggcggtgcttgttcctcagcctcttctccttcctgatcgtggcaggcgccaccacgctcttctgcctgctgcactttggagtgatcggcccccagagggaagagttccccagggacctctctctaatcagccctctggcccaggcagtcagatcatcttctcgaaccccgagtgacaagcctgtagcccatgttgtagcaaaccctcaagctgaggggcagctccagtggctgaaccgccgggccaatgccctcctggccaatggcgtggagctgagagataaccagctggtggtgccatcagagggcctgtacctcatctactcccaggtcctcttcaagggccaaggctgcccctccacccatgtgctcctcacccacaccatcagccgcatcgccgtctcctaccagaccaaggtcaacctcctctctgccatcaagagcccctgccagagggagaccccagagggggctgaggccaagccctggtatgagcccatctatctgggaggggtcttccagctggagaagggtgaccgactcagcgctgagatcaatcggcccgactatctcgactttgccgagtctgggcaggtctactttgggatcattgccctgtga

SEQ ID NO: 468 - DNA, 3972 bp, Homo sapiens
  source 1..3972: mol_type = genomic DNA
gggctgtcccaggcttgtccctgctacccccacccagcctttcctgaggcctcaagcctgccaccaagcccccagctccttctccccgcagggacccaaacacaggcctcaggactcaacacagcttttccctccaaccccgttttctctccctcaaggactcagctttctgaagcccctcccagttctagttctatctttttcctgcatcctgtctggaagttagaaggaaacagaccacagacctggtccccaaaagaaatggaggcaataggttttgaggggcatggggacggggttcagcctccagggtcctacacacaaatcagtcagtggcccagaagacccccctcggaatcggagcagggaggatggggagtgtgaggggtatccttgatgcttgtgtgtccccaactttccaaatccccgcccccgcgatggagaagaaaccgagacagaaggtgcagggcccactaccgcttcctccagatgagctcatgggtttctccaccaaggaagttttccgctggttgaatgattctttccccgccctcctctcgccccagggacatataaaggcagttgttggcacacccagccagcagacgctccctcagcaaggacagcagaggaccagctaagagggagagaagcaactacagaccccccctgaaaacaaccctcagacgccacatcccctgacaagctgccaggcaggttctcttcctctcacatactgacccacggctccaccctctctcccctggaaaggacaccatgagcactgaaagcatgatccgggacgtggagctggccgaggaggcgctccccaagaagacaggggggccccagggctccaggcggtgcttgttcctcagcctcttctccttcctgatcgtggcaggcgccaccacgctcttctgcctgctgcactttggagtgatcggcccccagagggaagaggtgagtgcctggccagccttcatccactctcccacccaaggggaaatggagacgcaagagagggagagagatgggatgggtgaaagatgtgcgctgatagggagggatggagagaaaaaaacgtggagaaagacggggatgcagaaagagatgtggcaagagatggggaagagagagagagaaagatggagagacaggatgtctggcacatggaaggtgctcactaagtgtgtatggagtgaatgaatgaatgaatgaatgaacaagcagatatataaataagatatggagacagatgtggggtgtgagaagagagatgggggaagaaacaagtgatatgaataaagatggtgagacagaaagagcgggaaatatgacagctaaggagagagatgggggagataaggagagaagaagatagggtgtctggcacacagaagacactcagggaaagagctgttgaatgcctggaaggtgaatacacagatgaatggagagagaaaaccagacacctcagggctaagagcgcaggccagacaggcagccagctgttcctcctttaagggtgactccctcgatgttaaccattctccttctccccaacagttccccagggacctctctctaatcagccctctggcccaggcagtcagtaagtgtctccaaacctctttcctaattctgggtttgggtttgggggtagggttagtaccggtatggaagcagtgggggaaatttaaagttttggtcttgggggaggatggatggaggtgaaagtaggggggtattttctaggaagtttaagggtctcagctttttcttttctctctcctcttcaggatcatcttctcgaaccccgagtgacaagcctgtagcccatgttgtaggtaagagctctgaggatgtgtcttggaacttggagggctaggatttggggattgaagcccggctgatggtaggcagaacttggagacaatgtgagaaggactcgctgagctcaagggaagggtggaggaacagcacaggccttagtgggatactcagaacgtcatggccaggtgggatgtgggatgacagacagagaggacaggaaccggatgtggggtgggcagagctcgagggccaggatgtggagagtgaaccgacatggccacactgactctcctctccctctctccctccctccagcaaaccctcaagctgaggggcagctccagtggctgaaccgccgggccaatgccctcctggccaatggcgtggagctgagagataaccagctggtggtgccatcagagggcctgtacctcatctactcccaggtcctcttcaagggccaaggctgcccctccacccatgtgctcctcacccacaccatcagccgcatcgccgtctcctaccagaccaaggtcaacctcctctctgccatcaagagcccctgccagagggagaccccagagggggctgaggccaagccctggtatgagcccatctatctgggaggggtcttccagctggagaagggtgaccgactcagcgctgagatcaatcggcccgactatctcgactttgccgagtctgggcaggtctactttgggatcattgccctgtgaggaggacgaacatccaaccttcccaaacgcctcccctgccccaatccctttattaccccctccttcagacaccctcaacctcttctggctcaaaaagagaattgggggcttagggtcggaacccaagcttagaactttaagcaacaagaccaccacttcgaaacctgggattcaggaatgtgtggcctgcacagtgaagtgctggcaaccactaagaattcaaactggggcctccagaactcactggggcctacagctttgatccctgacatctggaatctggagaccagggagcctttggttctggccagaatgctgcaggacttgagaagacctcacctagaaattgacacaagtggaccttaggccttcctctctccagatgtttccagacttccttgagacacggagcccagccctccccatggagccagctccctctatttatgtttgcacttgtgattatttattatttatttattatttatttatttacagatgaatgtatttatttgggagaccggggtatcctgggggacccaatgtaggagctgccttggctcagacatgttttccgtgaaaacggagctgaacaataggctgttcccatgtagccccctggcctctgtgccttcttttgattatgttttttaaaatatttatctgattaagttgtctaaacaatgctgatttggtgaccaactgtcactcattgctgagcctctgctccccaggggagttgtgtctgtaatcgccctactattcagtggcgagaaataaagtttgcttagaaaagaaacatggtctccttcttggaattaattctgcatctgcctcttcttgtgggtgggaagaagctccctaagtcctctctccacaggctttaagatccctcggacccagtcccatccttagactcctagggccctggagaccctacataaacaaagcccaacagaatattccccatcccccaggaaacaagagcctgaacctaattacctctccctcagggcatgggaatttccaactctgggaattccaatccttgctgggaaaatcctgcagctcaggtgagatttccggctgttgcagctggccagcagtccggagagagctggagaggagccgcattctcaggtacctgaatcacacagccaagggacttccagagattcgggtgtctaggcttcaaatcaccctgtcctaactctgcaacctgaaccagccacttaacctatctatccaatggggataggaatgtccaccacacatagggcatgtgagagaaggcctgacctccatcagaggacctcactcagcccttggcacagtgggcacttagtgaattctggcttccttcaaccagtttccagctgttctatccccttccattctc

SEQ ID NO: 469 - protein, 275 aa, Homo sapiens
METLLGVSLVILWLQLARVNSQQGEEDPQALSIQEGENATMNCSYKTSINNLQWYRQNSGRGLVHLILIRSNEREKHSGRLRVTLDTSKKSSSLLITASRAADTASYFCATANAGGTSYGKLTFGQGTILTVHPNIQNPDPAVYQLRDSKSSDKSVCLFTDFDSQTNVSQSKDSDVYITDKTVLDMRSMDFKSNSAVAWSNKSDFACANAFNNSIIPEDTFFPSPESSCDVKLVEKSFETDTNLNFQNLSVIGFRILLLKVAGFNLLMTLRLWSS

SEQ ID NO: 470 - DNA, 828 bp, Homo sapiens
  source 1..828: mol_type = genomic DNA
atggaaactctcctgggagtgtctttggtgattctatggcttcaactggctagggtgaacagtcaacagggagaagaggatcctcaggccttgagcatccaggagggtgaaaatgccaccatgaactgcagttacaaaactagtataaacaatttacagtggtatagacaaaattcaggtagaggccttgtccacctaattttaatacgttcaaatgaaagagagaaacacagtggaagattaagagtcacgcttgacacttccaagaaaagcagttccttgttgatcacggcttcccgggcagcagacactgcttcttacttctgtgctacggctaatgctggtggtactagctatggaaagctgacatttggacaagggaccatcttgactgtccatccaaatatccagaaccctgaccctgccgtgtaccagctgagagactctaaatccagtgacaagtctgtctgcctattcaccgattttgattctcaaacaaatgtgtcacaaagtaaggattctgatgtgtatatcacagacaaaactgtgctagacatgaggtctatggacttcaagagcaacagtgctgtggcctggagcaacaaatctgactttgcatgtgcaaacgccttcaacaacagcattattccagaagacaccttcttccccagcccagaaagttcctgtgatgtcaagctggtcgagaaaagctttgaaacagatacgaacctaaactttcaaaacctgtcagtgattgggttccgaatcctcctcctgaaagtggccgggtttaatctgctcatgacgctgcggctgtggtccagctga

SEQ ID NO: 471 - DNA, 5851 bp, Homo sapiens
  source 1..5851: mol_type = genomic DNA
aaggccttatatcgagtaaacggtagtgctggggcttagacgcaggtgttctgatttatagttcaaaacctctatcaatgagagagcaatctcctggtaatgtgatagatttcccaacttaatgccaacataccataaacctcccattctgctaatgcccagcctaagttggggagaccactccagattccaagatgtacagtttgctttgctgggcctttttcccatgcctgcctttactctgccagagttatattgctggggttttgaagaagatcctattaaataaaagaataagcagtattattaagtagccctgcatttcaggtttccttgagtggcaggccaggcctggccgtgaacgttcactgaaatcatggcctcttggccaagattgatagcttgtgcctgtccctgagtcccagtccatcacgagcagctggtttctaagatgctatttcccgtataaagcatgagaccgtgacttgccagccccacagagccccgcccttgtccatcactggcatctggactccagcctgggttggggcaaagagggaaatgagatcatgtcctaaccctgatcctcttgtcccacagatatccagaaccctgaccctgccgtgtaccagctgagagactctaaatccagtgacaagtctgtctgcctattcaccgattttgattctcaaacaaatgtgtcacaaagtaaggattctgatgtgtatatcacagacaaaactgtgctagacatgaggtctatggacttcaagagcaacagtgctgtggcctggagcaacaaatctgactttgcatgtgcaaacgccttcaacaacagcattattccagaagacaccttcttccccagcccaggtaagggcagctttggtgccttcgcaggctgtttccttgcttcaggaatggccaggttctgcccagagctctggtcaatgatgtctaaaactcctctgattggtggtctcggccttatccattgccaccaaaaccctctttttactaagaaacagtgagccttgttctggcagtccagagaatgacacgggaaaaaagcagatgaagagaaggtggcaggagagggcacgtggcccagcctcagtctctccaactgagttcctgcctgcctgcctttgctcagactgtttgccccttactgctcttctaggcctcattctaagccccttctccaagttgcctctccttatttctccctgtctgccaaaaaatctttcccagctcactaagtcagtctcacgcagtcactcattaacccaccaatcactgattgtgccggcacatgaatgcaccaggtgttgaagtggaggaattaaaaagtcagatgaggggtgtgcccagaggaagcaccattctagttgggggagcccatctgtcagctgggaaaagtccaaataacttcagattggaatgtgttttaactcagggttgagaaaacagctaccttcaggacaaaagtcagggaagggctctctgaagaaatgctacttgaagataccagccctaccaagggcagggagaggaccctatagaggcctgggacaggagctcaatgagaaaggagaagagcagcaggcatgagttgaatgaaggaggcagggccgggtcacagggccttctaggccatgagagggtagacagtattctaaggacgccagaaagctgttgatcggcttcaagcaggggagggacacctaatttgcttttcttttttttttttttttttttttttttttttgagatggagttttgctcttgttgcccaggctggagtgcaatggtgcatcttggctcactgcaacctccgcctcccaggttcaagtgattctcctgcctcagcctcccgagtagctgagattacaggcacccgccaccatgcctggctaattttttgtatttttagtagagacagggtttcactatgttggccaggctggtctcgaactcctgacctcaggtgatccacccgcttcagcctcccaaagtgctgggattacaggcgtgagccaccacacccggcctgcttttcttaaagatcaatctgagtgctgtacggagagtgggttgtaagccaagagtagaagcagaaagggagcagttgcagcagagagatgatggaggcctgggcagggtggtggcagggaggtaaccaacaccattcaggtttcaaaggtagaaccatgcagggatgagaaagcaaagaggggatcaaggaaggcagctggattttggcctgagcagctgagtcaatgatagtgccgtttactaagaagaaaccaaggaaaaaatttggggtgcagggatcaaaactttttggaacatatgaaagtacgtgtttatactctttatggcccttgtcactatgtatgcctcgctgcctccattggactctagaatgaagccaggcaagagcagggtctatgtgtgatggcacatgtggccagggtcatgcaacatgtactttgtacaaacagtgtatattgagtaaatagaaatggtgtccaggagccgaggtatcggtcctgccagggccaggggctctccctagcaggtgctcatatgctgtaagttccctccagatctctccacaaggaggcatggaaaggctgtagttgttcacctgcccaagaactaggaggtctggggtgggagagtcagcctgctctggatgctgaaagaatgtctgtttttccttttagaaagttcctgtgatgtcaagctggtcgagaaaagctttgaaacaggtaagacaggggtctagcctgggtttgcacaggattgcggaagtgatgaacccgcaataaccctgcctggatgagggagtgggaagaaattagtagatgtgggaatgaatgatgaggaatggaaacagcggttcaagacctgcccagagctgggtggggtctctcctgaatccctctcaccatctctgactttccattctaagcactttgaggatgagtttctagcttcaatagaccaaggactctctcctaggcctctgtattcctttcaacagctccactgtcaagagagccagagagagcttctgggtggcccagctgtgaaatttctgagtcccttagggatagccctaaacgaaccagatcatcctgaggacagccaagaggttttgccttctttcaagacaagcaacagtactcacataggctgtgggcaatggtcctgtctctcaagaatcccctgccactcctcacacccaccctgggcccatattcatttccatttgagttgttcttattgagtcatccttcctgtggtagcggaactcactaaggggcccatctggacccgaggtattgtgatgataaattctgagcacctaccccatccccagaagggctcagaaataaaataagagccaagtctagtcggtgtttcctgtcttgaaacacaatactgttggccctggaagaatgcacagaatctgtttgtaaggggatatgcacagaagctgcaagggacaggaggtgcaggagctgcaggcctcccccacccagcctgctctgccttggggaaaaccgtgggtgtgtcctgcaggccatgcaggcctgggacatgcaagcccataaccgctgtggcctcttggttttacagatacgaacctaaactttcaaaacctgtcagtgattgggttccgaatcctcctcctgaaagtggccgggtttaatctgctcatgacgctgcggctgtggtccagctgaggtgaggggccttgaagctgggagtggggtttagggacgcgggtctctgggtgcatcctaagctctgagagcaaacctccctgcagggtcttgcttttaagtccaaagcctgagcccaccaaactctcctacttcttcctgttacaaattcctcttgtgcaataataatggcctgaaacgctgtaaaatatcctcatttcagccgcctcagttgcacttctcccctatgaggtaggaagaacagttgtttagaaacgaagaaactgaggccccacagctaatgagtggaggaagagagacacttgtgtacaccacatgccttgtgttgtacttctctcaccgtgtaacctcctcatgtcctctctccccagtacggctctcttagctcagtagaaagaagacattacactcatattacaccccaatcctggctagagtctccgcaccctcctcccccagggtccccagtcgtcttgctgacaactgcatcctgttccatcaccatcaaaaaaaaactccaggctgggtgcgggggctcacacctgtaatcccagcactttgggaggcagaggcaggaggagcacaggagctggagaccagcctgggcaacacagggagaccccgcctctacaaaaagtgaaaaaattaaccaggtgtggtgctgcacacctgtagtcccagctacttaagaggctgagatgggaggatcgcttgagccctggaatgttgaggctacaatgagctgtgattgcgtcactgcactccagcctggaagacaaagcaagatcctgtctcaaataataaaaaaaataagaactccagggtacatttgctcctagaactctaccacatagccccaaacagagccatcaccatcacatccctaacagtcctgggtcttcctcagtgtccagcctgacttctgttcttcctcattccagatctgcaagattgtaagacagcctgtgctccctcgctccttcctctgcattgcccctcttctccctctccaaacagagggaactctcctacccccaaggaggtgaaagctgctaccacctctgtgcccccccggcaatgccaccaactggatcctacccgaatttatgattaagattgctgaagagctgccaaacactgctgccaccccctctgttcccttattgctgcttgtcactgcctgacattcacggcagaggcaaggctgctgcagcctcccctggctgtgcacattccctcctgctccccagagactgcctccgccatcccacagatgatggatcttcagtgggttctcttgggctctaggtcctgcagaatgttgtgaggggtttatttttttttaatagtgttcataaagaaatacatagtattcttcttctcaagacgtggggggaaattatctcattatcgaggccctgctatgctgtgtatctgggcgtgttgtatgtcctgctgccgatgccttcattaaaatgatttggaagagcagagactgtgcctctgtttgactgggtttggtaggagtcattttctgcttgctggtgatcactagctgggcagagaaaaaccaaggcatttgtctatgatgctgtccaggaagcctcattcaacaagctgcctaagtcaacctcttcttggaataacctctaaaagcttccgcttagcaggctatgctgagggccaggaaaacccacctaccagcttggacccctcctctcccactctcatgccacgccacgggaccacccataacaggagcccacacacatgggtggcagtgacctgcggcagacagggaccacacagcaagtgtccccaaaatgccacccactgtctcctgccctccaggagcatttcctttgcctctcctctcagactgggtttccactgaaactgtgcattgtctcacaaattcgtggctggggaccacccaccactctgctgcctgatccagccccacgccagccctttgaggtgcccaagctgacaccaggagcaaggttgagaggaagctgtgaccccagcaggactttatgttcccaccatcccggatgtgagaatgaggaaaaaaggagatgagctgtctcccc

SEQ ID NO: 472 - protein, 358 aa, Homo sapiens
MVDGTLLLLLSEALALTQTWAGSHSLKYFHTSVSRPGRGEPRFISVGYVDDTQFVRFDNDAASPRMVPRAPWMEQEGSEYWDRETRSARDTAQIFRVNLRTLRGYYNQSEAGSHTLQWMHGCELGPDGRFLRGYEQFAYDGKDYLTLNEDLRSWTAVDTAAQISEQKSNDASEAEHQRAYLEDTCVEWLHKYLEKGKETLLHLEPPKTHVTHHPISDHEATLRCWALGFYPAEITLTWQQDGEGHTQDTELVETRPAGDGTFQKWAAVVVPSGEEQRYTCHVQHEGLPEPVTLRWKPASQPTIPIVGIIAGLVLLGSVVSGAVVAAVIWRKKSSGGKGGSYSKAEWSDSAQGSESHSL

SEQ ID NO: 473 - DNA, 4686 bp, Homo sapiens
  source 1..4686: mol_type = genomic DNA
ctcaggactcagaggctgggatcatggtagatggaaccctccttttactcctctcggaggccctggcccttacccagacctgggcgggtgagtgcggggtcgggatggaaacggcctctaccgggagtagagaggggccggcccggcgggggcgaaggactcggggagccgcgccgggaggagggtcgggccgatctcagcccctcctcgcccccaggctcccactccttgaagtatttccacacttccgtgtcccggcccggccgcggggagccccgcttcatctctgtgggctacgtggacgacacccagttcgtgcgcttcgacaacgacgccgcgagtccgaggatggtgccgcgggcgccgtggatggagcaggaggggtcagagtattgggaccgggagacacggagcgccagggacaccgcacagattttccgagtgaatctgcggacgctgcgcggctactacaatcagagcgaggccggtgagtgaccccggccaggggagcaggtcacgacccctccccatcccccacggacggcgcgggtcccctcgaatcttcgggtcccagattcaccccaaggctgcggaacccgcccagaccctagaccggggagagtctcaggcgcctttacccggttctttttcagtttaggccaaaatgcccacagggtggtggcgacgggggcggggcttggtgggcgggactgactaaggggcggggccagggtctcacaccctgcagtggatgcatggctgcgagctggggcccgacgggcgcttcctccgcgggtatgaacagttcgcctacgacggcaaggattatctcaccctgaatgaggacctgcgctcctggaccgcggtggacacggcggctcagatctccgagcaaaagtcaaatgatgcctctgaggcggagcaccagagagcctacctggaagacacatgcgtggagtggctccacaaatacctggagaaggggaaggagacgctgcttcacctgggtaagagggtccacagggctactctcccatctccttcttgggctaggactgtgcccacagctgacagacctcaaacagtagaagaaacagggatggaggccagaataccactcctcccttggatcaggagagggagctgtcacctgaggtacaggagatcctataccacagagtgactctcttaaagggccagacctctctcaggggcaattaaggaatctagtctcgctggagattccatccttcagatgaactgatgagcagttctctttgactcccagtattaggaatcacgggggagtttctctcgtgcctgattctcagccccacaccaagagtttttggaggtctgactccagcttttctcagtcactcagcatccacacaggccaggaccagaaatcccttttcaccttctaccctgggctagctcatcccgattctagaactttccaaggaataagaggctatcccagatccctaagtccaggctggtgtcaaggttttgtcctcttctcctactataattgtcctcttccttctcaggatggtcacatgggtgctgctggagtgtcccatgagagatacaaagtgcctgaattttctgactcttcccctcagagcccccaaagacacacgtgactcaccaccccatctctgaccatgaggccaccctgaggtgctgggccctgggcttctaccctgcggagatcacactgacctggcagcaggatggggagggccatacccaggacacggagctcgtggagaccaggcctgcaggggatggaaccttccagaagtgggcagctgtggtggtgccttctggagaggagcagagatacacgtgccatgtgcagcatgaggggctacccgagcccgtcaccctgagatggagtaaggagggggatgggaggtcatgtctcttctcagggaaagcgggagcccttctggagcccttccgcagggtcagggctgaggcctgggggtcagggccccttacgttcccctcttttcccagagccggcttcccagcccaccatccccatcgtgggcatcattgctggcctggttctccttggatctgtggtctctggagctgtggttgctgctgtgatatggaggaagaagagctcaggtggggaagggagaagggtggggtctgagttttcttgtcccactgggtgtttcaagccctaggtaaaagtgtgtcctgcctcgttactgggaagcaccatccacacacacgagcctacccagcctggggccctgtgtgccagcacctactctttttttttgagacggagtcttggctctgtcacccaggctggagtgcaatggcgtggtttcagctcactgcaacctccgcctcccaggttcaagcaattctcctgcctcagcctccctagtagctgggactacacatgcgtgccaccacacctggctaatttttttttttgtatttttagtggagatggggtttcactatgttggccaggctggtctcgaactcctgactttgtgatctgcctgcctcggcctcccaaagtgctgggattacagtcgtgagccaccgcacccagccgcacctactcttttgtaaagcacctgtgacaatgaaggacagatttatcaccttgacgattgtggtgatggggacctgatcccagcagtcacaggtcacaggggaaggtccctgctgaagacagacctcagaagggcagttgatccaggacccacacctgctttcttcacgtttcctgatcctgccctgggtctgcagtcacagttcaggaaacttctctgggatccaaaactaggaggttcctctaggaccttatggccctgcctcctccctggcccctcacaggacattttcttccaacaggtggaaaaggagggagctactctaaggctgagtgtaagtgcggggcgggagcgtggaggagctcgcccaccctataattcctcctgcaccacatctcctgtgggctctgaccaggtcttgtttttgttctaccccagggagcgacagtgcccaggggtctgagtctcacagcttgtaaaggtgagattctgggggtctgaagtgggtggagggtggggcagaggggacaggactgggttgtggggattttttgattcagaatttttgagtgtgtggtgggctgttcagagtgtcatcacttaccgtgactgacctgaatttgttcatgactattttcttctgtagcctgagacagctgccttgtgtgcgactgagatgcacagctgccttgtgtgcgactgagatgcaggatttcctcacgcctcccctatgtgtcttaggggactctggcttctctttttgcaagggcctctgaatctgtctgtgtccctgttagcacaatgtgaggaggtagagaaacagtccacctctgtgtctaccatgacccccttcctcacactgacctgtgttccttccctgttctcttttctattaaaaataagaacctgggcagagtgcggcagctcatgcctgtaatcccagcacttagggaggccgaggagggcagatcacgaggtcaggagatcgaaaccatcctggctaacacggtgaaaccccgtctctactaaaaaatacaaaaaattagctgggcgcagaggcacgggcctgtagtcccagctactcaggaggcggaggcaggagaatggcgtcaacccgggaggcggaggttgcagtgagccaggattgtgcgactgcactccagcctgggtgacagggtgaaacgccatctcaaaaaataaaaattgaaaaataaaaaaagaacctggatctcaatttaatttttcatattcttgcaatgaaatggacttgaggaagctaagatcatagctagaaatacagataattccacagcacatctctagcaaatttagcctattcctattctctagcctattccttaccacctgtaatcttgaccatataccttggagttgaatattgttttcatactgctgtggtttgaatgttccctccaacactcatgttgagacttaatccctaatgtggcaatactgaaaggtggggcctttgagatgtgattggatcgtaaggctgtgccttcattcatgggttaatggattaatgggttatcacaggaatgggactggtggctttataagaagaggaaaagagaactgagctagcatgcccagcccacagagagcctccactagagtgatgctaagtggaaatgtgaggtgcagctgccacagagggcccccaccagggaaatgtctagtgtctagtggatccaggccacaggagagagtgccttgtggagcgctgggagcaggacctgaccaccaccaggaccccagaactgtggagtcagtggcagcatgcagcgcccccttgggaaagctttaggcaccagcctgcaacccattcgagcagccacgtaggctgcacccagcaaagccacaggcacggggctacctgaggccttgggggcccaatccctgctccagtgtgtccgtgaggcagcacacgaagtcaaaagagattattctcttcccacagataccttttctctcccatgaccctttaacagcatctgcttcattcccctcaccttcccaggctgatctgaggtaaactttgaagtaaaataaaagctgtgtttgagcatca

SEQ ID NO: 474 - protein, 48 aa, Synthetic construct
CPYSNPSLCSGGGGSELPTQGTFSNVSTNVSPAKPTTTACPYSNPSLC

SEQ ID NO: 475 - protein, 47 aa, Synthetic construct
CPYSNPSLCSGGGGSELPTQGTFSNVSTNVSPAKPTTTCPYSNPSLC

SEQ ID NO: 476 - protein, 60 aa, Synthetic construct
SGGGGSCPYSNPSLCSGGGGSELPTQGTFSNVSTNVSPAKPTTTACPYSNPSLCSGGGGS

SEQ ID NO: 477 - skipped

SEQ ID NO: 478 - protein, 32 aa, Synthetic construct
CPYSNPSLCSGGGGSPAKPTTTACPYSNPSLC

SEQ ID NO: 479 - protein, 38 aa, Synthetic construct
SGGGGSCPYSNPSLCSGGGGSPAKPTTTACPYSNPSLC

SEQ ID NO: 480 - protein, 44 aa, Synthetic construct
SGGGGSCPYSNPSLCSGGGGSPAKPTTTACPYSNPSLCSGGGGS

SEQ ID NO: 481 - protein, 86 aa, Synthetic construct
SGGGGSCPYSNPSLCSGGGGSPAKPTTTACPYSNPSLCSGGGGSPAPRPPTPAPTIASQPLSLRPEACRPAAGGAVHTRGLDFACD

SEQ ID NO: 482 - protein, 83 aa, Synthetic construct
SGGGGSCPYSNPSLCSGGGGSPAKPTTTACPYSNPSLCSGGGGSIEVMYPPPYLDNEKSNGTIIHVKGKHLCPSPLFPGPSKP

SEQ ID NO: 483 - protein, 78 aa, Synthetic construct
SGGGGSCPYSNPSLCSGGGGSPAKPTTTACPYSNPSLCSIEVMYPPPYLDNEKSNGTIIHVKGKHLCPSPLFPGPSKP

SEQ ID NO: 484 - protein, 33 aa, Synthetic construct
ELPTQGTFSNVSTNVSSSGGGGSGGGGSGGGGS

SEQ ID NO: 485 - protein, 1837 aa, Synthetic construct
MSSETGPVAVDPTLRRRIEPHEFEVFFDPRELRKETCLLYEINWGGRHSIWRHTSQNTNKHVEVNFIEKFTTERYFCPNTRCSITWFLSWSPCGECSRAITEFLSRYPHVTLFIYIARLYHHADPRNRQGLRDLISSGVTIQIMTEQESGYCWRNFVNYSPSNEAHWPRYPHLWVRLYVLELYCIILGLPPCLNILRRKQPQLTFFTIALQSCHYQRLPPHILWATGLKSGGSSGGSSGSETPGTSESATPESSGGSSGGSDKKYSIGLAIGTNSVGWAVITDEYKVPSKKFKVLGNTDRHSIKKNLIGALLFDSGETAEATRLKRTARRRYTRRKNRICYLQEIFSNEMAKVDDSFFHRLEESFLVEEDKKHERHPIFGNIVDEVAYHEKYPTIYHLRKKLVDSTDKADLRLIYLALAHMIKFRGHFLIEGDLNPDNSDVDKLFIQLVQTYNQLFEENPINASGVDAKAILSARLSKSRRLENLIAQLPGEKKNGLFGNLIALSLGLTPNFKSNFDLAEDAKLQLSKDTYDDDLDNLLAQIGDQYADLFLAAKNLSDAILLSDILRVNTEITKAPLSASMIKRYDEHHQDLTLLKALVRQQLPEKYKEIFFDQSKNGYAGYIDGGASQEEFYKFIKPILEKMDGTEELLVKLNREDLLRKQRTFDNGSIPHQIHLGELHAILRRQEDFYPFLKDNREKIEKILTFRIPYYVGPLARGNSRFAWMTRKSEETITPWNFEEVVDKGASAQSFIERMTNFDKNLPNEKVLPKHSLLYEYFTVYNELTKVKYVTEGMRKPAFLSGEQKKAIVDLLFKTNRKVTVKQLKEDYFKKIECFDSVEISGVEDRFNASLGTYHDLLKIIKDKDFLDNEENEDILEDIVLTLTLFEDREMIEERLKTYAHLFDDKVMKQLKRRRYTGWGRLSRKLINGIRDKQSGKTILDFLKSDGFANRNFMQLIHDDSLTFKEDIQKAQVSGQGDSLHEHIANLAGSPAIKKGILQTVKVVDELVKVMGRHKPENIVIEMARENQTTQKGQKNSRERMKRIEEGIKELGSQILKEHPVENTQLQNEKLYLYYLQNGRDMYVDQELDINRLSDYDVDHIVPQSFLKDDSIDNKVLTRSDKNRGKSDNVPSEEVVKKMKNYWRQLLNAKLITQRKFDNLTKAERGGLSELDKAGFIKRQLVETRQITKHVAQILDSRMNTKYDENDKLIREVKVITLKSKLVSDFRKDFQFYKVREINNYHHAHDAYLNAVVGTALIKKYPKLESEFVYGDYKVYDVRKMIAKSEQEIGKATAKYFFYSNIMNFFKTEITLANGEIRKRPLIETNGETGEIVWDKGRDFATVRKVLSMPQVNIVKKTEVQTGGFSKESILPKRNSDKLIARKKDWDPKKYGGFDSPTVAYSVLVVAKVEKGKSKKLKSVKELLGITIMERSSFEKNPIDFLEAKGYKEVKKDLIIKLPKYSLFELENGRKRMLASAGELQKGNELALPSKYVNFLYLASHYEKLKGSPEDNEQKQLFVEQHKHYLDEIIEQISEFSKRVILADANLDKVLSAYNKHRDKPIREQAENIIHLFTLTNLGAPAAFKYFDTTIDRKRYTSTKEVLDATLIHQSITGLYETRIDLSQLGGDSGGSGGSGGSTNLSDIIEKETGKQLVIQESILMLPEEVEEVIGNKPESDILVHTAYDESTDENVMLLTSDAPEYKPWALVIQDSNGENKIKMLSGGSGGSGGSTNLSDIIEKETGKQLVIQESILMLPEEVEEVIGNKPESDILVHTAYDESTDENVMLLTSDAPEYKPWALVIQDSNGENKIKMLSGGSKRTADGSEFESPKKKRKVE

SEQ ID NO: 486 - protein, 15 aa, Synthetic construct
GGGGSGGGGSGGGGS

SEQ ID NO: 487 - protein, 20 aa, Synthetic construct
METDTLLLWVLLLWVPGSTG

SEQ ID NO: 488 - protein, 9 aa, Synthetic construct
CPYSNPSLC

SEQ ID NO: 489 - protein, 17 aa, Synthetic construct
PAKPTTTACPYSNPSLC

SEQ ID NO: 490 - protein, 16 aa, Synthetic construct
PAKPTTTCPYSNPSLC

SEQ ID NO: 491 - protein, 6 aa, Synthetic construct
SGGGGS

SEQ ID NO: 492 - protein, 42 aa, Synthetic construct
PAPRPPTPAPTIASQPLSLRPEACRPAAGGAVHTRGLDFACD

SEQ ID NO: 493 - protein, 319 aa, Homo sapiens
MVVMAPRTLFLLLSGALTLTETWAGSHSMRYFSAAVSRPGRGEPRFIAMGYVDDTQFVRFDSDSACPRMEPRAPWVEQEGPEYWEEETRNTKAHAQTDRMNLQTLRGYYNQSEASSHTLQWMIGCDLGSDGRLLRGYEQYAYDGKDYLALNEDLRSWTAADTAAQISKRKCEAANVAEQRRAYLEGTCVEWLHRYLENGKEMLQRADPPKTHVTHHPVFDYEATLRCWALGFYPAEIILTWQRDGEDQTQDVELVETRPAGDGTFQKWAAVVVPSGEEQRYTCHVQHEGLPEPLMLRWSKEGDGGIMSVRESRSLSEDL

SEQ ID NO: 494 - protein, 315 aa, Synthetic construct
MYRMQLLSCIALSLALVTNSGSHSMRYFSAAVSRPGRGEPRFIAMGYVDDTQFVRFDSDSACPRMEPRAPWVEQEGPEYWEEETRNTKAHAQTDRMNLQTLRGYYNQSEASSHTLQWMIGCDLGSDGRLLRGYEQYAYDGKDYLALNEDLRSWTAADTAAQISKRKCEAANVAEQRRAYLEGTCVEWLHRYLENGKEMLQRADPPKTHVTHHPVFDYEATLRCWALGFYPAEIILTWQRDGEDQTQDVELVETRPAGDGTFQKWAAVVVPSGEEQRYTCHVQHEGLPEPLMLRWSKEGDGGIMSVRESRSLSEDL

SEQ ID NO: 495 - protein, 458 aa, Synthetic construct
MYRMQLLSCIALSLALVTNSIQRTPKIQVYSRHPAENGKSNFLNCYVSGFHPSDIEVDLLKNGERIEKVEHSDLSFSKDWSFYLLYYTEFTPTEKDEYACRVNHVTLSQPKIVKWDRDMGGGGSGGGGSGGGGSRIIPRHLQLGGGGSGGGGSGGGGSGGGGSGSHSMRYFSAAVSRPGRGEPRFIAMGYVDDTQFVRFDSDSACPRMEPRAPWVEQEGPEYWEEETRNTKAHAQTDRMNLQTLRGYYNQSEASSHTLQWMIGCDLGSDGRLLRGYEQYAYDGKDYLALNEDLRSWTAADTAAQISKRKCEAANVAEQRRAYLEGTCVEWLHRYLENGKEMLQRADPPKTHVTHHPVFDYEATLRCWALGFYPAEIILTWQRDGEDQTQDVELVETRPAGDGTFQKWAAVVVPSGEEQRYTCHVQHEGLPEPLMLRWSKEGDGGIMSVRESRSLSEDL

SEQ ID NO: 496 - protein, 458 aa, Synthetic construct
MSRSVALAVLALLSLSGLEAVMAPRTLFLGGGGSGGGGSGGGGSIQRTPKIQVYSRHPAENGKSNFLNCYVSGFHPSDIEVDLLKNGERIEKVEHSDLSFSKDWSFYLLYYTEFTPTEKDEYACRVNHVTLSQPKIVKWDRDMGGGGSGGGGSGGGGSGGGGSGSHSLKYFHTSVSRPGRGEPRFISVGYVDDTQFVRFDNDAASPRMVPRAPWMEQEGSEYWDRETRSARDTAQIFRVNLRTLRGYYNQSEAGSHTLQWMHGCELGPDGRFLRGYEQFAYDGKDYLTLNEDLRSWTAVDTAAQISEQKSNDASEAEHQRAYLEDTCVEWLHKYLEKGKETLLHLEPPKTHVTHHPISDHEATLRCWALGFYPAEITLTWQQDGEGHTQDTELVETRPAGDGTFQKWAAVVVPSGEEQRYTCHVQHEGLPEPVTLRWSKEGDGGIMSVRESRSLSEDL

SEQ ID NO: 497 - protein, 427 aa, Synthetic construct
MSRSVALAVLALLSLSGLEAVMAPRTLFLGGSGGGASGGGSHSLKYFHTSVSRPGRGEPRFISVGYVDDTQFVRFDNDAASPRMVPRAPWMEQEGSEYWDRETRSARDTAQIFRVNLRTLRGYYNQSEAGSHTLQWMHGCELGPDGRFLRGYEQFAYDGKDYLTLNEDLRSWTAVDTAAQISEQKSNDASEAEHQRAYLEDTCVEWLHKYLEKGKETLLHLEPPKTHVTHHPISDHEATLRCWALGFYPAEITLTWQQDGEGHTQDTELVETRPAGDGTFQKWAAVVVPSGEEQRYTCHVQHEGLPEPVTLRWGGGGSGGGGSGGGGSIQRTPKIQVYSRHPAENGKSNFLNCYVSGFHPSDIEVDLLKNGERIEKVEHSDLSFSKDWSFYLLYYTEFTPTEKDEYACRVNHVTLSQPKIVKWDRDM

SEQ ID NO: 498 - protein, 334 aa, Synthetic construct
MSRSVALAVLALLSLSGLEAVMAPRTLFLGGSGGGASGGGSHSLKYFHTSVSRPGRGEPRFISVGYVDDTQFVRFDNDAASPRMVPRAPWMEQEGSEYWDRETRSARDTAQIFRVNLRTLRGYYNQSEAGSHTLQWMHGCELGPDGRFLRGYEQFAYDGKDYLTLNEDLRSWTAVDTAAQISEQKSNDASEAEHQRAYLEDTCVEWLHKYLEKGKETLLHLEPPKTHVTHHPISDHEATLRCWALGFYPAEITLTWQQDGEGHTQDTELVETRPAGDGTFQKWAAVVVPSGEEQRYTCHVQHEGLPEPVTLRWSKEGDGGIMSVRESRSLSEDL

SEQ ID NO: 499 - protein, 313 aa, Synthetic construct
MSRSVALAVLALLSLSGLEAVMAPRTLFLGGSGGGASGGGSHSLKYFHTSVSRPGRGEPRFISVGYVDDTQFVRFDNDAASPRMVPRAPWMEQEGSEYWDRETRSARDTAQIFRVNLRTLRGYYNQSEAGSHTLQWMHGCELGPDGRFLRGYEQFAYDGKDYLTLNEDLRSWTAVDTAAQISEQKSNDASEAEHQRAYLEDTCVEWLHKYLEKGKETLLHLEPPKTHVTHHPISDHEATLRCWALGFYPAEITLTWQQDGEGHTQDTELVETRPAGDGTFQKWAAVVVPSGEEQRYTCHVQHEGLPEPVTLRW

SEQ ID NO: 500 - protein, 473 aa, Synthetic construct
MSRSVALAVLALLSLSGLEAVMAPRTLFLGGGGSGGGGSGGGGSIQRTPKIQVYSRHPAENGKSNFLNCYVSGFHPSDIEVDLLKNGERIEKVEHSDLSFSKDWSFYLLYYTEFTPTEKDEYACRVNHVTLSQPKIVKWDRDMGGGGSGGGGSGGGGSGGGGSGSHSLKYFHTSVSRPGRGEPRFISVGYVDDTQFVRFDNDAASPRMVPRAPWMEQEGSEYWDRETRSARDTAQIFRVNLRTLRGYYNQSEAGSHTLQWMHGCELGPDGRFLRGYEQFAYDGKDYLTLNEDLRSWTAVDTAAQISEQKSNDASEAEHQRAYLEDTCVEWLHKYLEKGKETLLHLEPPKTHVTHHPISDHEATLRCWALGFYPAEITLTWQQDGEGHTQDTELVETRPAGDGTFQKWAAVVVPSGEEQRYTCHVQHEGLPEPVTLRWKPASQPTIPIMALIVLGGVAGLLLFIGLGIFFCVRC

SEQ ID NO: 501 - RNA, 100 nt, Synthetic construct
  source 1..100: mol_type = other RNA
ctcaccgtctcctggggagagttttagagctagaaatagcaagttaaaataaggctagtccgttatcaacttgaaaaagtggcaccgagtcggtgctttt

SEQ ID NO: 502 - RNA, 100 nt, Synthetic construct
  source 1..100: mol_type = other RNA
accggtgtagtgcaccacgcgttttagagctagaaatagcaagttaaaataaggctagtccgttatcaacttgaaaaagtggcaccgagtcggtgctttt

SEQ ID NO: 503 - RNA, 100 nt, Synthetic construct
  source 1..100: mol_type = other RNA
tacccaagaacagggagctagttttagagctagaaatagcaagttaaaataaggctagtccgttatcaacttgaaaaagtggcaccgagtcggtgctttt

SEQ ID NO: 504 - RNA, 100 nt, Synthetic construct
  source 1..100: mol_type = other RNA
ccccaacagatctgccatgggttttagagctagaaatagcaagttaaaataaggctagtccgttatcaacttgaaaaagtggcaccgagtcggtgctttt

SEQ ID NO: 505 - RNA, 100 nt, Synthetic construct
  source 1..100: mol_type = other RNA
ttcacagggatgcttgaagagttttagagctagaaatagcaagttaaaataaggctagtccgttatcaacttgaaaaagtggcaccgagtcggtgctttt

SEQ ID NO: 506 - RNA, 100 nt, Synthetic construct
  source 1..100: mol_type = other RNA
cgccgccatgggagtgcagggttttagagctagaaatagcaagttaaaataaggctagtccgttatcaacttgaaaaagtggcaccgagtcggtgctttt

SEQ ID NO: 507 - RNA, 100 nt, Synthetic construct
  source 1..100: mol_type = other RNA
caggtggaaaccatctccccgttttagagctagaaatagcaagttaaaataaggctagtccgttatcaacttgaaaaagtggcaccgagtcggtgctttt

SEQ ID NO: 508 - RNA, 100 nt, Synthetic construct
  source 1..100: mol_type = other RNA
gcgccctgaggagacagagagttttagagctagaaatagcaagttaaaataaggctagtccgttatcaacttgaaaaagtggcaccgagtcggtgctttt

SEQ ID NO: 509 - RNA, 100 nt, Synthetic construct
  source 1..100: mol_type = other RNA
cgccctgaggagacagagacgttttagagctagaaatagcaagttaaaataaggctagtccgttatcaacttgaaaaagtggcaccgagtcggtgctttt

SEQ ID NO: 510 - RNA, 100 nt, Synthetic construct
  source 1..100: mol_type = other RNA
caagcgcggccagacctgcggttttagagctagaaatagcaagttaaaataaggctagtccgttatcaacttgaaaaagtggcaccgagtcggtgctttt

SEQ ID NO: 511 - RNA, 100 nt, Synthetic construct
  source 1..100: mol_type = other RNA
actcatctgtgaaaagaacagttttagagctagaaatagcaagttaaaataaggctagtccgttatcaacttgaaaaagtggcaccgagtcggtgctttt

SEQ ID NO: 512 - RNA, 100 nt, Synthetic construct
  source 1..100: mol_type = other RNA
cgatgtggagcttctaaaacgttttagagctagaaatagcaagttaaaataaggctagtccgttatcaacttgaaaaagtggcaccgagtcggtgctttt

SEQ ID NO: 513 - RNA, 100 nt, Synthetic construct
  source 1..100: mol_type = other RNA
agcaggaggtgatccgaggcgttttagagctagaaatagcaagttaaaataaggctagtccgttatcaacttgaaaaagtggcaccgagtcggtgctttt

SEQ ID NO: 514 - RNA, 100 nt, Synthetic construct
  source 1..100: mol_type = other RNA
gcaggaggtgatccgaggctgttttagagctagaaatagcaagttaaaataaggctagtccgttatcaacttgaaaaagtggcaccgagtcggtgctttt

SEQ ID NO: 515 - RNA, 100 nt, Synthetic construct
  source 1..100: mol_type = other RNA
gtgatccgaggctgggaagagttttagagctagaaatagcaagttaaaataaggctagtccgttatcaacttgaaaaagtggcaccgagtcggtgctttt

SEQ ID NO: 516 - RNA, 100 nt, Synthetic construct
  source 1..100: mol_type = other RNA
gatccgaggctgggaagaaggttttagagctagaaatagcaagttaaaataaggctagtccgttatcaacttgaaaaagtggcaccgagtcggtgctttt

SEQ ID NO: 517 - RNA, 100 nt, Synthetic construct
  source 1..100: mol_type = other RNA
aggtttcaggaacttacaccgttttagagctagaaatagcaagttaaaataaggctagtccgttatcaacttgaaaaagtggcaccgagtcggtgctttt

SEQ ID NO: 518 - RNA, 100 nt, Synthetic construct
  source 1..100: mol_type = other RNA
tactcattaataatcagatcgttttagagctagaaatagcaagttaaaataaggctagtccgttatcaacttgaaaaagtggcaccgagtcggtgctttt

SEQ ID NO: 519 - RNA, 100 nt, Synthetic construct
  source 1..100: mol_type = other RNA
acctgaagagagaagcagtagttttagagctagaaatagcaagttaaaataaggctagtccgttatcaacttgaaaaagtggcaccgagtcggtgctttt

SEQ ID NO: 520 - RNA, 100 nt, Synthetic construct
  source 1..100: mol_type = other RNA
aaccttttagttcctaaggagttttagagctagaaatagcaagttaaaataaggctagtccgttatcaacttgaaaaagtggcaccgagtcggtgctttt

SEQ ID NO: 521 - RNA, 100 nt, Synthetic construct
  source 1..100: mol_type = other RNA
ttcctttatagaatgttatggttttagagctagaaatagcaagttaaaataaggctagtccgttatcaacttgaaaaagtggcaccgagtcggtgctttt

SEQ ID NO: 522 - RNA, 100 nt, Synthetic construct
  source 1..100: mol_type = other RNA
ctccaagcagcgaagactttgttttagagctagaaatagcaagttaaaataaggctagtccgttatcaacttgaaaaagtggcaccgagtcggtgctttt

SEQ ID NO: 523 - RNA, 100 nt, Synthetic construct
  source 1..100: mol_type = other RNA
gggccaaatcagcctttcctgttttagagctagaaatagcaagttaaaataaggctagtccgttatcaacttgaaaaagtggcaccgagtcggtgctttt

SEQ ID NO: 524 - RNA, 100 nt, Synthetic construct
  source 1..100: mol_type = other RNA
ggccaaatcagcctttcctcgttttagagctagaaatagcaagttaaaataaggctagtccgttatcaacttgaaaaagtggcaccgagtcggtgctttt

SEQ ID NO: 525 - RNA, 100 nt, Synthetic construct
  source 1..100: mol_type = other RNA
gccaaatcagcctttcctcggttttagagctagaaatagcaagttaaaataaggctagtccgttatcaacttgaaaaagtggcaccgagtcggtgctttt

SEQ ID NO: 526 - RNA, 100 nt, Synthetic construct
  source 1..100: mol_type = other RNA
ccaaatcagcctttcctcgggttttagagctagaaatagcaagttaaaataaggctagtccgttatcaacttgaaaaagtggcaccgagtcggtgctttt

SEQ ID NO: 527 - RNA, 100 nt, Synthetic construct
  source 1..100: mol_type = other RNA
caacatttgaagggccagacgttttagagctagaaatagcaagttaaaataaggctagtccgttatcaacttgaaaaagtggcaccgagtcggtgctttt

SEQ ID NO: 528 - RNA, 100 nt, Synthetic construct
  source 1..100: mol_type = other RNA
ggccagactggcaccaacgggttttagagctagaaatagcaagttaaaataaggctagtccgttatcaacttgaaaaagtggcaccgagtcggtgctttt

SEQ ID NO: 529 - RNA, 100 nt, Synthetic construct
  source 1..100: mol_type = other RNA
caggatttggagttttcttcgttttagagctagaaatagcaagttaaaataaggctagtccgttatcaacttgaaaaagtggcaccgagtcggtgctttt

SEQ ID NO: 530 - RNA, 100 nt, Synthetic construct
  source 1..100: mol_type = other RNA
tactgtcaggcaagctttccgttttagagctagaaatagcaagttaaaataaggctagtccgttatcaacttgaaaaagtggcaccgagtcggtgctttt

SEQ ID NO: 531 - RNA, 100 nt, Synthetic construct
  source 1..100: mol_type = other RNA
gctgtcctatatggaataaagttttagagctagaaatagcaagttaaaataaggctagtccgttatcaacttgaaaaagtggcaccgagtcggtgctttt

SEQ ID NO: 532 - RNA, 100 nt, Synthetic construct
  source 1..100: mol_type = other RNA
cagcacaattacctatgtgcgttttagagctagaaatagcaagttaaaataaggctagtccgttatcaacttgaaaaagtggcaccgagtcggtgctttt

SEQ ID NO: 533 - RNA, 100 nt, Synthetic construct
  source 1..100: mol_type = other RNA
ccgctatcgaaaatgtcttcgttttagagctagaaatagcaagttaaaataaggctagtccgttatcaacttgaaaaagtggcaccgagtcggtgctttt

SEQ ID NO: 534 - RNA, 100 nt, Synthetic construct
  source 1..100: mol_type = other RNA
tcttcaggctggaatgaaccgttttagagctagaaatagcaagttaaaataaggctagtccgttatcaacttgaaaaagtggcaccgagtcggtgctttt

SEQ ID NO: 535 - RNA, 100 nt, Synthetic construct
  source 1..100: mol_type = other RNA
ggaattcagcaggccactacgttttagagctagaaatagcaagttaaaataaggctagtccgttatcaacttgaaaaagtggcaccgagtcggtgctttt

SEQ ID NO: 536 - RNA, 100 nt, Synthetic construct
  source 1..100: mol_type = other RNA
caagaaacctctgaaaatccgttttagagctagaaatagcaagttaaaataaggctagtccgttatcaacttgaaaaagtggcaccgagtcggtgctttt

SEQ ID NO: 537 - RNA, 100 nt, Synthetic construct
  source 1..100: mol_type = other RNA
accacaactcacccctacccgttttagagctagaaatagcaagttaaaataaggctagtccgttatcaacttgaaaaagtggcaccgagtcggtgctttt

SEQ ID NO: 538 - RNA, 100 nt, Synthetic construct
  source 1..100: mol_type = other RNA
acctgaattaagagaaataagttttagagctagaaatagcaagttaaaataaggctagtccgttatcaacttgaaaaagtggcaccgagtcggtgctttt

SEQ ID NO: 539 - RNA, 100 nt, Synthetic construct
  source 1..100: mol_type = other RNA
tgaccctactgcagtactccgttttagagctagaaatagcaagttaaaataaggctagtccgttatcaacttgaaaaagtggcaccgagtcggtgctttt

SEQ ID NO: 540 - RNA, 100 nt, Synthetic construct
  source 1..100: mol_type = other RNA
gcctgtgaaagataaatagcgttttagagctagaaatagcaagttaaaataaggctagtccgttatcaacttgaaaaagtggcaccgagtcggtgctttt

SEQ ID NO: 541 - RNA, 100 nt, Synthetic construct
  source 1..100: mol_type = other RNA
actccagccagaactggcaggttttagagctagaaatagcaagttaaaataaggctagtccgttatcaacttgaaaaagtggcaccgagtcggtgctttt

SEQ ID NO: 542 - RNA, 100 nt, Synthetic construct
  source 1..100: mol_type = other RNA
ttatcaactgacaaaactctgttttagagctagaaatagcaagttaaaataaggctagtccgttatcaacttgaaaaagtggcaccgagtcggtgctttt

SEQ ID NO: 543 - RNA, 100 nt, Synthetic construct
  source 1..100: mol_type = other RNA
accacctgcaagagaagatagttttagagctagaaatagcaagttaaaataaggctagtccgttatcaacttgaaaaagtggcaccgagtcggtgctttt

SEQ ID NO: 544 - RNA, 100 nt, Synthetic construct
  source 1..100: mol_type = other RNA
ctattgcttccaaacattttgttttagagctagaaatagcaagttaaaataaggctagtccgttatcaacttgaaaaagtggcaccgagtcggtgctttt

SEQ ID NO: 545 - RNA, 100 nt, Synthetic construct
  source 1..100: mol_type = other RNA
cagataccaaaatattcaaagttttagagctagaaatagcaagttaaaataaggctagtccgttatcaacttgaaaaagtggcaccgagtcggtgctttt

SEQ ID NO: 546 - RNA, 100 nt, Synthetic construct
  source 1..100: mol_type = other RNA
tcaggagaggggagatgtgagttttagagctagaaatagcaagttaaaataaggctagtccgttatcaacttgaaaaagtggcaccgagtcggtgctttt

SEQ ID NO: 547 - RNA, 100 nt, Synthetic construct
  source 1..100: mol_type = other RNA
gcccgacctcaaaggagacggttttagagctagaaatagcaagttaaaataaggctagtccgttatcaacttgaaaaagtggcaccgagtcggtgctttt

SEQ ID NO: 548 - RNA, 100 nt, Synthetic construct
  source 1..100: mol_type = other RNA
cttacagctgtttgcagacagttttagagctagaaatagcaagttaaaataaggctagtccgttatcaacttgaaaaagtggcaccgagtcggtgctttt

SEQ ID NO: 549 - RNA, 100 nt, Synthetic construct
  source 1..100: mol_type = other RNA
atggaccaacctgctgtcttgttttagagctagaaatagcaagttaaaataaggctagtccgttatcaacttgaaaaagtggcaccgagtcggtgctttt

SEQ ID NO: 550 - RNA, 100 nt, Synthetic construct
  source 1..100: mol_type = other RNA
cgtacctgacacataaacccgttttagagctagaaatagcaagttaaaataaggctagtccgttatcaacttgaaaaagtggcaccgagtcggtgctttt

SEQ ID NO: 551 - RNA, 100 nt, Synthetic construct
  source 1..100: mol_type = other RNA
gtacccttaccactcagtctgttttagagctagaaatagcaagttaaaataaggctagtccgttatcaacttgaaaaagtggcaccgagtcggtgctttt

SEQ ID NO: 552 - RNA, 100 nt, Synthetic construct
  source 1..100: mol_type = other RNA
tcttccttttcaaggttggagttttagagctagaaatagcaagttaaaataaggctagtccgttatcaacttgaaaaagtggcaccgagtcggtgctttt

SEQ ID NO: 553 - RNA, 20 nt, Synthetic construct
  source 1..20: mol_type = other RNA
ctcaccgtctcctggggaga

SEQ ID NO: 554 - RNA, 20 nt, Synthetic construct
  source 1..20: mol_type = other RNA
accggtgtagtgcaccacgc

SEQ ID NO: 555 - RNA, 20 nt, Synthetic construct
  source 1..20: mol_type = other RNA
tacccaagaacagggagcta

SEQ ID NO: 556 - RNA, 20 nt, Synthetic construct
  source 1..20: mol_type = other RNA
ccccaacagatctgccatgg

SEQ ID NO: 557 - RNA, 20 nt, Synthetic construct
  source 1..20: mol_type = other RNA
ttcacagggatgcttgaaga

SEQ ID NO: 558 - RNA, 20 nt, Synthetic construct
  source 1..20: mol_type = other RNA
cgccgccatgggagtgcagg

SEQ ID NO: 559 - RNA, 20 nt, Synthetic construct
  source 1..20: mol_type = other RNA
caggtggaaaccatctcccc

SEQ ID NO: 560 - RNA, 20 nt, Synthetic construct
  source 1..20: mol_type = other RNA
gcgccctgaggagacagaga

SEQ ID NO: 561 - RNA, 20 nt, Synthetic construct
  source 1..20: mol_type = other RNA
cgccctgaggagacagagac

SEQ ID NO: 562 - RNA, 20 nt, Synthetic construct
  source 1..20: mol_type = other RNA
caagcgcggccagacctgcg

SEQ ID NO: 563 - RNA, 20 nt, Synthetic construct
  source 1..20: mol_type = other RNA
actcatctgtgaaaagaaca

SEQ ID NO: 564 - RNA, 20 nt, Synthetic construct
  source 1..20: mol_type = other RNA
cgatgtggagcttctaaaac

SEQ ID NO: 565 - RNA, 20 nt, Synthetic construct
  source 1..20: mol_type = other RNA
agcaggaggtgatccgaggc

SEQ ID NO: 566 - RNA, 20 nt, Synthetic construct
  source 1..20: mol_type = other RNA
gcaggaggtgatccgaggct

SEQ ID NO: 567 - RNA, 20 nt, Synthetic construct
  source 1..20: mol_type = other RNA
gtgatccgaggctgggaaga

SEQ ID NO: 568 - RNA, 20 nt, Synthetic construct
  source 1..20: mol_type = other RNA
gatccgaggctgggaagaag

SEQ ID NO: 569 - RNA, 20 nt, Synthetic construct
  source 1..20: mol_type = other RNA
aggtttcaggaacttacacc

SEQ ID NO: 570 - RNA, 20 nt, Synthetic construct
  source 1..20: mol_type = other RNA
tactcattaataatcagatc

SEQ ID NO: 571 - RNA, 20 nt, Synthetic construct
  source 1..20: mol_type = other RNA
acctgaagagagaagcagta

SEQ ID NO: 572 - RNA, 20 nt, Synthetic construct
  source 1..20: mol_type = other RNA
aaccttttagttcctaagga

SEQ ID NO: 573 - RNA, 20 nt, Synthetic construct
  source 1..20: mol_type = other RNA
ttcctttatagaatgttatg

SEQ ID NO: 574 - RNA, 20 nt, Synthetic construct
  source 1..20: mol_type = other RNA
ctccaagcagcgaagacttt

SEQ ID NO: 575 - RNA, 20 nt, Synthetic construct
  source 1..20: mol_type = other RNA
gggccaaatcagcctttcct

SEQ ID NO: 576 - RNA, 20 nt, Synthetic construct
  source 1..20: mol_type = other RNA
ggccaaatcagcctttcctc

SEQ ID NO: 577 - RNA, 20 nt, Synthetic construct
  source 1..20: mol_type = other RNA
gccaaatcagcctttcctcg

SEQ ID NO: 578 - RNA, 20 nt, Synthetic construct
  source 1..20: mol_type = other RNA
ccaaatcagcctttcctcgg

SEQ ID NO: 579 - RNA, 20 nt, Synthetic construct
  source 1..20: mol_type = other RNA
caacatttgaagggccagac

SEQ ID NO: 580 - RNA, 20 nt, Synthetic construct
  source 1..20: mol_type = other RNA
ggccagactggcaccaacgg

SEQ ID NO: 581 - RNA, 20 nt, Synthetic construct
  source 1..20: mol_type = other RNA
caggatttggagttttcttc

SEQ ID NO: 582 - RNA, 20 nt, Synthetic construct
  source 1..20: mol_type = other RNA
tactgtcaggcaagctttcc

SEQ ID NO: 583 - RNA, 20 nt, Synthetic construct
  source 1..20: mol_type = other RNA
gctgtcctatatggaataaa

SEQ ID NO: 584 - RNA, 20 nt, Synthetic construct
  source 1..20: mol_type = other RNA
cagcacaattacctatgtgc

SEQ ID NO: 585 - RNA, 20 nt, Synthetic construct
  source 1..20: mol_type = other RNA
ccgctatcgaaaatgtcttc

SEQ ID NO: 586 - RNA, 20 nt, Synthetic construct
  source 1..20: mol_type = other RNA
tcttcaggctggaatgaacc

SEQ ID NO: 587 - RNA, 20 nt, Synthetic construct
  source 1..20: mol_type = other RNA
ggaattcagcaggccactac

SEQ ID NO: 588 - RNA, 20 nt, Synthetic construct
  source 1..20: mol_type = other RNA
caagaaacctctgaaaatcc

SEQ ID NO: 589 - RNA, 20 nt, Synthetic construct
  source 1..20: mol_type = other RNA
accacaactcacccctaccc

SEQ ID NO: 590 - RNA, 20 nt, Synthetic construct
  source 1..20: mol_type = other RNA
acctgaattaagagaaataa

SEQ ID NO: 591 - RNA, 20 nt, Synthetic construct
  source 1..20: mol_type = other RNA
tgaccctactgcagtactcc

SEQ ID NO: 592 - RNA, 20 nt, Synthetic construct
  source 1..20: mol_type = other RNA
gcctgtgaaagataaatagc

SEQ ID NO: 593 - RNA, 20 nt, Synthetic construct
  source 1..20: mol_type = other RNA
actccagccagaactggcag

SEQ ID NO: 594 - RNA, 20 nt, Synthetic construct
  source 1..20: mol_type = other RNA
ttatcaactgacaaaactct

SEQ ID NO: 595 - RNA, 20 nt, Synthetic construct
  source 1..20: mol_type = other RNA
accacctgcaagagaagata

SEQ ID NO: 596 - RNA, 20 nt, Synthetic construct
  source 1..20: mol_type = other RNA
ctattgcttccaaacatttt

SEQ ID NO: 597 - RNA, 20 nt, Synthetic construct
  source 1..20: mol_type = other RNA
cagataccaaaatattcaaa

SEQ ID NO: 598 - RNA, 20 nt, Synthetic construct
  source 1..20: mol_type = other RNA
tcaggagaggggagatgtga

SEQ ID NO: 599 - RNA, 20 nt, Synthetic construct
  source 1..20: mol_type = other RNA
gcccgacctcaaaggagacg

SEQ ID NO: 600 - RNA, 20 nt, Synthetic construct
  source 1..20: mol_type = other RNA
cttacagctgtttgcagaca

SEQ ID NO: 601 - RNA, 20 nt, Synthetic construct
  source 1..20: mol_type = other RNA
atggaccaacctgctgtctt

SEQ ID NO: 602 - RNA, 20 nt, Synthetic construct
  source 1..20: mol_type = other RNA
cgtacctgacacataaaccc

SEQ ID NO: 603 - RNA, 20 nt, Synthetic construct
  source 1..20: mol_type = other RNA
gtacccttaccactcagtct

SEQ ID NO: 604 - RNA, 20 nt, Synthetic construct
  source 1..20: mol_type = other RNA
tcttccttttcaaggttgga

SEQ ID NO: 605 - RNA, 20 nt, Synthetic construct
  source 1..20: mol_type = other RNA
aagtcaacttcaatgtcgga

SEQ ID NO: 606 - RNA, 20 nt, Synthetic construct
  source 1..20: mol_type = other RNA
acaaagtcacatggttcaca

SEQ ID NO: 607 - RNA, 20 nt, Synthetic construct
  source 1..20: mol_type = other RNA
acagcccaagatagttaagt

SEQ ID NO: 608 - RNA, 20 nt, Synthetic construct
  source 1..20: mol_type = other RNA
acccagacacatagcaattc

SEQ ID NO: 609 - RNA, 20 nt, Synthetic construct
  source 1..20: mol_type = other RNA
actcacgctggatagcctcc

SEQ ID NO: 610 - RNA, 20 nt, Synthetic construct
  source 1..20: mol_type = other RNA
acttgtctttcagcaaggac

SEQ ID NO: 611 - RNA, 20 nt, Synthetic construct
  source 1..20: mol_type = other RNA
agtcacatggttcacacggc

SEQ ID NO: 612 - RNA, 20 nt, Synthetic construct
  source 1..20: mol_type = other RNA
atactcatctttttcagtgg

SEQ ID NO: 613 - RNA, 20 nt, Synthetic construct
  source 1..20: mol_type = other RNA
cacagcccaagatagttaag

SEQ ID NO: 614 - RNA, 20 nt, Synthetic construct
  source 1..20: mol_type = other RNA
cagcccaagatagttaagtg

SEQ ID NO: 615 - RNA, 20 nt, Synthetic construct
  source 1..20: mol_type = other RNA
cagtaagtcaacttcaatgt

SEQ ID NO: 616 - RNA, 20 nt, Synthetic construct
  source 1..20: mol_type = other RNA
catactcatctttttcagtg

SEQ ID NO: 617 - RNA, 20 nt, Synthetic construct
  source 1..20: mol_type = other RNA
cgcgagcacagctaaggcca

SEQ ID NO: 618 - RNA, 20 nt, Synthetic construct
  source 1..20: mol_type = other RNA
cgtgagtaaacctgaatctt

SEQ ID NO: 619 - RNA, 19 nt, Synthetic construct
  source 1..19: mol_type = other RNA
ctcacgctggatagcctcc

SEQ ID NO: 620 - RNA, 20 nt, Synthetic construct
  source 1..20: mol_type = other RNA
ctcaggtactccaaagattc

SEQ ID NO: 621 - RNA, 20 nt, Synthetic construct
  source 1..20: mol_type = other RNA
cttaccccacttaactatct

SEQ ID NO: 622 - RNA, 20 nt, Synthetic construct
  source 1..20: mol_type = other RNA
gaagttgacttactgaagaa

SEQ ID NO: 623 - RNA, 20 nt, Synthetic construct
  source 1..20: mol_type = other RNA
gagtagcgcgagcacagcta

SEQ ID NO: 624 - RNA, 20 nt, Synthetic construct
  source 1..20: mol_type = other RNA
gcatactcatctttttcagt

SEQ ID NO: 625 - RNA, 20 nt, Synthetic construct
  source 1..20: mol_type = other RNA
gctactctctctttctggcc

SEQ ID NO: 626 - RNA, 20 nt, Synthetic construct
  source 1..20: mol_type = other RNA
ggcatactcatctttttcag

SEQ ID NO: 627 - RNA, 18 nt, Synthetic construct
  source 1..18: mol_type = other RNA
taccccacttaactatct

SEQ ID NO: 628 - RNA, 18 nt, Synthetic construct
  source 1..18: mol_type = other RNA
tcacgctggatagcctcc

SEQ ID NO: 629 - RNA, 20 nt, Synthetic construct
  source 1..20: mol_type = other RNA
tcgatctatgaaaaagacag

SEQ ID NO: 630 - RNA, 20 nt, Synthetic construct
  source 1..20: mol_type = other RNA
tggagagagaattgaaaaag

SEQ ID NO: 631 - RNA, 20 nt, Synthetic construct
  source 1..20: mol_type = other RNA
tggagtacctgaggaatatc

SEQ ID NO: 632 - RNA, 20 nt, Synthetic construct
  source 1..20: mol_type = other RNA
tgggctgtgacaaagtcaca

SEQ ID NO: 633 - RNA, 20 nt, Synthetic construct
  source 1..20: mol_type = other RNA
ttaccccacttaactatctt

SEQ ID NO: 634 - RNA, 20 nt, Synthetic construct
  source 1..20: mol_type = other RNA
ttcagacttgtctttcagca

SEQ ID NO: 635 - RNA, 20 nt, Synthetic construct
  source 1..20: mol_type = other RNA
tttgactttccattctctgc

SEQ ID NO: 636 - RNA, 20 nt, Synthetic construct
  source 1..20: mol_type = other RNA
acacactgtggggggtgggg

SEQ ID NO: 637 - RNA, 20 nt, Synthetic construct
  source 1..20: mol_type = other RNA
acacagacacgtgagtttat

SEQ ID NO: 638 - RNA, 20 nt, Synthetic construct
  source 1..20: mol_type = other RNA
acactgtggggggtggggtg

SEQ ID NO: 639 - RNA, 20 nt, Synthetic construct
  source 1..20: mol_type = other RNA
actcacctgataagaggcag

SEQ ID NO: 640 - RNA, 20 nt, Synthetic construct
  source 1..20: mol_type = other RNA
cacactgtggggggtggggt

SEQ ID NO: 641 - RNA, 20 nt, Synthetic construct
  source 1..20: mol_type = other RNA
ccgactgcatctttgtttca

SEQ ID NO: 642 - RNA, 20 nt, Synthetic construct
  source 1..20: mol_type = other RNA
cgttacctcatagtctgggt

SEQ ID NO: 643 - RNA, 20 nt, Synthetic construct
  source 1..20: mol_type = other RNA
ctggattacctcttgccctc

SEQ ID NO: 644 - RNA, 20 nt, Synthetic construct
  source 1..20: mol_type = other RNA
gttacctcatagtctgggtt

SEQ ID NO: 645 - RNA, 20 nt, Synthetic construct
  source 1..20: mol_type = other RNA
taccacctgaaaatgaaaaa

SEQ ID NO: 646 - RNA, 20 nt, Synthetic construct
  source 1..20: mol_type = other RNA
tatatgctggggagaaagaa

SEQ ID NO: 647 - RNA, 20 nt, Synthetic construct
  source 1..20: mol_type = other RNA
ttatatgctggggagaaaga

SEQ ID NO: 648 - RNA, 20 nt, Synthetic construct
  source 1..20: mol_type = other RNA
ttgtcctgcggaggaaggag

SEQ ID NO: 649 - RNA, 20 nt, Synthetic construct
  source 1..20: mol_type = other RNA
tttgtcctgcggaggaagga

SEQ ID NO: 650 - RNA, 20 nt, Synthetic construct
  source 1..20: mol_type = other RNA
ttttgtcctgcggaggaagg

SEQ ID NO: 651 - RNA, 20 nt, Synthetic construct
  source 1..20: mol_type = other RNA
acatacttctgtaatacact

SEQ ID NO: 652 - RNA, 20 nt, Synthetic construct
  source 1..20: mol_type = other RNA
accttcaaggaaaccagttg

SEQ ID NO: 653 - RNA, 20 nt, Synthetic construct
  source 1..20: mol_type = other RNA
catggaacaggggaagggcc

SEQ ID NO: 654 - RNA, 20 nt, Synthetic construct
  source 1..20: mol_type = other RNA
ctcttccattgggtacataa

SEQ ID NO: 655 - RNA, 20 nt, Synthetic construct
  source 1..20: mol_type = other RNA
cttcaaggtaagggcctact

SEQ ID NO: 656 - RNA, 20 nt, Synthetic construct
  source 1..20: mol_type = other RNA
gaccagtacagccaccttca

SEQ ID NO: 657 - RNA, 20 nt, Synthetic construct
  source 1..20: mol_type = other RNA
tctcctacctttgattgact

SEQ ID NO: 658 - RNA, 20 nt, Synthetic construct
  source 1..20: mol_type = other RNA
tgaccagctctaccaggtaa

SEQ ID NO: 659 - RNA, 20 nt, Synthetic construct
  source 1..20: mol_type = other RNA
tgactatcaagaagatggtt

SEQ ID NO: 660 - RNA, 20 nt, Synthetic construct
  source 1..20: mol_type = other RNA
tggcccagtcaatcaaaggt

SEQ ID NO: 661 - RNA, 20 nt, Synthetic construct
  source 1..20: mol_type = other RNA
ttctcctacctttgattgac

SEQ ID NO: 662 - RNA, 20 nt, Synthetic construct
  source 1..20: mol_type = other RNA
tttaaaccatgtgatatttt

SEQ ID NO: 663 - RNA, 20 nt, Synthetic construct
  source 1..20: mol_type = other RNA
ccctacctgtcaccaggacc

SEQ ID NO: 664 - RNA, 20 nt, Synthetic construct
  source 1..20: mol_type = other RNA
aaaggcactgcaagagacaa

SEQ ID NO: 665 - RNA, 20 nt, Synthetic construct
  source 1..20: mol_type = other RNA
acactcactccatcacccgg

SEQ ID NO: 666 - RNA, 20 nt, Synthetic construct
  source 1..20: mol_type = other RNA
acatcaaagtaccctacagg

SEQ ID NO: 667 - RNA, 20 nt, Synthetic construct
  source 1..20: mol_type = other RNA
accggctctgcaaaggccag

SEQ ID NO: 668 - RNA, 20 nt, Synthetic construct
  source 1..20: mol_type = other RNA
acctcccgagcaaacatgac

SEQ ID NO: 669 - RNA, 20 nt, Synthetic construct
  source 1..20: mol_type = other RNA
actggaccagtatgtcttcc

SEQ ID NO: 670 - RNA, 20 nt, Synthetic construct
  source 1..20: mol_type = other RNA
agactcagaggtgagaggag

SEQ ID NO: 671 - RNA, 20 nt, Synthetic construct
  source 1..20: mol_type = other RNA
agccaagtaccccctcccag

SEQ ID NO: 672 - RNA, 20 nt, Synthetic construct
  source 1..20: mol_type = other RNA
agccccaaggtaaaaaggcc

SEQ ID NO: 673 - RNA, 20 nt, Synthetic construct
  source 1..20: mol_type = other RNA
agcctaggaggcaaagagca

SEQ ID NO: 674 - RNA, 20 nt, Synthetic construct
  source 1..20: mol_type = other RNA
aggccattttggaagcttgt

SEQ ID NO: 675 - RNA, 20 nt, Synthetic construct
  source 1..20: mol_type = other RNA
aggctgcaggtggaatcaga

SEQ ID NO: 676 - RNA, 20 nt, Synthetic construct
  source 1..20: mol_type = other RNA
cacatcctgcaaggggggat

SEQ ID NO: 677 - RNA, 20 nt, Synthetic construct
  source 1..20: mol_type = other RNA
cactcaccttagcctgagca

SEQ ID NO: 678 - RNA, 20 nt, Synthetic construct
  source 1..20: mol_type = other RNA
cactcactccatcacccgga

SEQ ID NO: 679 - RNA, 20 nt, Synthetic construct
  source 1..20: mol_type = other RNA
cactcacttgagggtttcca

SEQ ID NO: 680 - RNA, 20 nt, Synthetic construct
  source 1..20: mol_type = other RNA
cagacatcaaagtaccctac

SEQ ID NO: 681 - RNA, 20 nt, Synthetic construct
  source 1..20: mol_type = other RNA
cagactgcggggacacagtg

SEQ ID NO: 682 - RNA, 20 nt, Synthetic construct
  source 1..20: mol_type = other RNA
cagctcacagtgtgccacca

SEQ ID NO: 683 - RNA, 20 nt, Synthetic construct
  source 1..20: mol_type = other RNA
ccacatcctgcaagggggga

SEQ ID NO: 684 - RNA, 20 nt, Synthetic construct
  source 1..20: mol_type = other RNA
ccactcaccttagcctgagc

SEQ ID NO: 685 - RNA, 20 nt, Synthetic construct
  source 1..20: mol_type = other RNA
cccacccaatgcccggcagc

SEQ ID NO: 686 - RNA, 20 nt, Synthetic construct
  source 1..20: mol_type = other RNA
cccccaggctttccccaaac

SEQ ID NO: 687 - RNA, 20 nt, Synthetic construct
  source 1..20: mol_type = other RNA
cctcctgcaatgcttcctgg

SEQ ID NO: 688 - RNA, 20 nt, Synthetic construct
  source 1..20: mol_type = other RNA
cctggtccagagcctgagca

SEQ ID NO: 689 - RNA, 20 nt, Synthetic construct
  source 1..20: mol_type = other RNA
ccttacctgtcatgtttgct

SEQ ID NO: 690 - RNA, 20 nt, Synthetic construct
  source 1..20: mol_type = other RNA
cgcccaggtcctcacgtctg

SEQ ID NO: 691 - RNA, 20 nt, Synthetic construct
  source 1..20: mol_type = other RNA
cgtccagtacaacaagttca

SEQ ID NO: 692 - RNA, 20 nt, Synthetic construct
  source 1..20: mol_type = other RNA
ctctggcaaatctctgaggc

SEQ ID NO: 693 - RNA, 20 nt, Synthetic construct
  source 1..20: mol_type = other RNA
ctgccaaattccagcctcct

SEQ ID NO: 694 - RNA, 20 nt, Synthetic construct
  source 1..20: mol_type = other RNA
ctggtcagggcaagagctat

SEQ ID NO: 695 - RNA, 20 nt, Synthetic construct
  source 1..20: mol_type = other RNA
cttagtccaacacccaccgc

SEQ ID NO: 696 - RNA, 20 nt, Synthetic construct
  source 1..20: mol_type = other RNA
cttcccccagctgaagtcct

SEQ ID NO: 697 - RNA, 20 nt, Synthetic construct
  source 1..20: mol_type = other RNA
gaacggcagctggcccaagg

SEQ ID NO: 698 - RNA, 20 nt, Synthetic construct
  source 1..20: mol_type = other RNA
gacacgagtgattgctgtgc

SEQ ID NO: 699 - RNA, 20 nt, Synthetic construct
  source 1..20: mol_type = other RNA
gaccagattcccagtatgtt

SEQ ID NO: 700 - RNA, 20 nt, Synthetic construct
  source 1..20: mol_type = other RNA
gagccagccacagggccccc

SEQ ID NO: 701 - RNA, 20 nt, Synthetic construct
  source 1..20: mol_type = other RNA
gagccccaaggtaaaaaggc

SEQ ID NO: 702 - RNA, 20 nt, Synthetic construct
  source 1..20: mol_type = other RNA
gcgtccacatcctgcaaggg

SEQ ID NO: 703 - RNA, 20 nt, Synthetic construct
  source 1..20: mol_type = other RNA
ggaagcagaaggtgcttgcg

SEQ ID NO: 704 - RNA, 20 nt, Synthetic construct
  source 1..20: mol_type = other RNA
ggcccaaggaggcctggctg

SEQ ID NO: 705 - RNA, 20 nt, Synthetic construct
  source 1..20: mol_type = other RNA
ggcgggccaagacttctccc

SEQ ID NO: 706 - RNA, 20 nt, Synthetic construct
  source 1..20: mol_type = other RNA
ggcgtccacatcctgcaagg

SEQ ID NO: 707 - RNA, 20 nt, Synthetic construct
  source 1..20: mol_type = other RNA
ggctgcagccggggacactg

SEQ ID NO: 708 - RNA, 20 nt, Synthetic construct
  source 1..20: mol_type = other RNA
gggcccacagccactcgtgg

SEQ ID NO: 709 - RNA, 20 nt, Synthetic construct
  source 1..20: mol_type = other RNA
gggcgtccacatcctgcaag

SEQ ID NO: 710 - RNA, 20 nt, Synthetic construct
  source 1..20: mol_type = other RNA
gtacaagctgtcggaaacag

SEQ ID NO: 711 - RNA, 20 nt, Synthetic construct
  source 1..20: mol_type = other RNA
taacatactgggaatctggt

SEQ ID NO: 712 - RNA, 20 nt, Synthetic construct
  source 1..20: mol_type = other RNA
tatgaccagatggacctggc

SEQ ID NO: 713 - RNA, 20 nt, Synthetic construct
  source 1..20: mol_type = other RNA
tcactccagatgctgcaggg

SEQ ID NO: 714 - RNA, 20 nt, Synthetic construct
  source 1..20: mol_type = other RNA
tgctctggagatggagaagc

SEQ ID NO: 715 - RNA, 20 nt, Synthetic construct
  source 1..20: mol_type = other RNA
tgggcgtccacatcctgcaa

SEQ ID NO: 716 - RNA, 20 nt, Synthetic construct
  source 1..20: mol_type = other RNA
tggtgcaggccaggctggag

SEQ ID NO: 717 - RNA, 20 nt, Synthetic construct
  source 1..20: mol_type = other RNA
tgtcttccaggactcccagc

SEQ ID NO: 718 - RNA, 20 nt, Synthetic construct
  source 1..20: mol_type = other RNA
ttcaaccaggagccagcctc

SEQ ID NO: 719 - RNA, 20 nt, Synthetic construct
  source 1..20: mol_type = other RNA
ttccagaagaagctgctccg

SEQ ID NO: 720 - RNA, 20 nt, Synthetic construct
  source 1..20: mol_type = other RNA
ttttaccttggggctctgac

SEQ ID NO: 721 - RNA, 20 nt, Synthetic construct
  source 1..20: mol_type = other RNA
acgactggccagggcgcctg

SEQ ID NO: 722 - RNA, 20 nt, Synthetic construct
  source 1..20: mol_type = other RNA
cacctacctaagaaccatcc

SEQ ID NO: 723 - RNA, 20 nt, Synthetic construct
  source 1..20: mol_type = other RNA
ggacccagactagcagcacc

SEQ ID NO: 724 - RNA, 20 nt, Synthetic construct
  source 1..20: mol_type = other RNA
ggagtctgagagatggagag

SEQ ID NO: 725 - RNA, 20 nt, Synthetic construct
  source 1..20: mol_type = other RNA
ggggttccagggcctgtctg

SEQ ID NO: 726 - RNA, 20 nt, Synthetic construct
  source 1..20: mol_type = other RNA
cctccttctttgaggagaaa

SEQ ID NO: 727 - RNA, 20 nt, Synthetic construct
  source 1..20: mol_type = other RNA
ccagtggcgagagaagaccc

SEQ ID NO: 728 - RNA, 20 nt, Synthetic construct
  source 1..20: mol_type = other RNA
tgcccagccactgaggcctg

SEQ ID NO: 729 - RNA, 20 nt, Synthetic construct
  source 1..20: mol_type = other RNA
cgactggccagggcgcctgt

SEQ ID NO: 730 - RNA, 20 nt, Synthetic construct
  source 1..20: mol_type = other RNA
accgcccagacgactggcca

SEQ ID NO: 731 - RNA, 20 nt, Synthetic construct
  source 1..20: mol_type = other RNA
caccgcccagacgactggcc

SEQ ID NO: 732 - RNA, 20 nt, Synthetic construct
  source 1..20: mol_type = other RNA
ttctctctggaagggcacaa

SEQ ID NO: 733 - RNA, 20 nt, Synthetic construct
  source 1..20: mol_type = other RNA
ctacaactgggctggcggcc

SEQ ID NO: 734 - RNA, 20 nt, Synthetic construct
  source 1..20: mol_type = other RNA
gacgttacctcgtgcggccc

SEQ ID NO: 735 - RNA, 20 nt, Synthetic construct
  source 1..20: mol_type = other RNA
cagcaaccagacggacaagc

SEQ ID NO: 736 - RNA, 20 nt, Synthetic construct
  source 1..20: mol_type = other RNA
cctgcagagaaacacacttg

SEQ ID NO: 737 - RNA, 20 nt, Synthetic construct
  source 1..20: mol_type = other RNA
cagttccaaaccctggtggt

SEQ ID NO: 738 - RNA, 20 nt, Synthetic construct
  source 1..20: mol_type = other RNA
gtgtcacacaactgcccaac

SEQ ID NO: 739 - RNA, 20 nt, Synthetic construct
  source 1..20: mol_type = other RNA
agccggccagttccaaaccc

SEQ ID NO: 740 - RNA, 20 nt, Synthetic construct
  source 1..20: mol_type = other RNA
cggccagttccaaaccctgg

SEQ ID NO: 741 - RNA, 20 nt, Synthetic construct
  source 1..20: mol_type = other RNA
tccctgcagagaaacacact

SEQ ID NO: 742 - RNA, 20 nt, Synthetic construct
  source 1..20: mol_type = other RNA
gagactcaccaggggctggc

SEQ ID NO: 743 - RNA, 20 nt, Synthetic construct
  source 1..20: mol_type = other RNA
ccagccaagtacgtaagtag

SEQ ID NO: 744 - RNA, 20 nt, Synthetic construct
  source 1..20: mol_type = other RNA
ctggatatctgtgggacaag

SEQ ID NO: 745 - RNA, 20 nt, Synthetic construct
  source 1..20: mol_type = other RNA
cttacctgggctggggaaga

SEQ ID NO: 746 - RNA, 20 nt, Synthetic construct
  source 1..20: mol_type = other RNA
gctacaaacaagctcatctt

SEQ ID NO: 747 - RNA, 20 nt, Synthetic construct
  source 1..20: mol_type = other RNA
ttcaaaacctgtcagtgatt

SEQ ID NO: 748 - RNA, 20 nt, Synthetic construct
  source 1..20: mol_type = other RNA
ttcgtatctgtaaaaccaag

SEQ ID NO: 749 - RNA, 20 nt, Synthetic construct
  source 1..20: mol_type = other RNA
tttcaaaacctgtcagtgat

SEQ ID NO: 750 - protein, 5 aa, Synthetic construct
SGGGS

SEQ ID NO: 751 - RNA, 20 nt, synthetic construct
  source 1..20: mol_type = other RNA
ccagacctcaccatggcccc

SEQ ID NO: 752 - DNA, 28 bp, synthetic construct
  source 1..28: mol_type = other DNA
tgtctttcagcaaggactggtctttcta

SEQ ID NO: 753 - DNA, 27 bp, synthetic construct
  source 1..27: mol_type = other DNA
cgcgctggcgggcattcctgaagctga

SEQ ID NO: 754 - DNA, 27 bp, synthetic construct
  source 1..27: mol_type = other DNA
gcgggccaccaaggagaacttggagaa

SEQ ID NO: 755 - DNA, 28 bp, synthetic construct
  source 1..28: mol_type = other DNA
ggatcacctgtcactgaaggaattttca

SEQ ID NO: 756 - DNA, 23 bp, synthetic construct
  source 1..23: mol_type = other DNA
gagctgcaggcctcccccaccca

SEQ ID NO: 757 - DNA, 19 bp, synthetic construct
  source 1..19: mol_type = other DNA
ccgaggtactaggcagagc

SEQ ID NO: 758 - DNA, 20 bp, synthetic construct
  source 1..20: mol_type = other DNA
cccaggagacggtgagtagt

SEQ ID NO: 759 - DNA, 20 bp, synthetic construct
  source 1..20: mol_type = other DNA
tatgcctatggtgccactgg

SEQ ID NO: 760 - DNA, 19 bp, synthetic construct
  source 1..19: mol_type = other DNA
gtcgccactgcacacaaag

SEQ ID NO: 761 - DNA, 20 bp, synthetic construct
  source 1..20: mol_type = other DNA
tgatgagtgctctgctgctg

SEQ ID NO: 762 - DNA, 28 bp, synthetic construct
  source 1..28: mol_type = other DNA
gactcattcagggtagtatggccataga

SEQ ID NO: 763 - DNA, 24 bp, synthetic construct
  source 1..24: mol_type = other DNA
cgcaaagacgcctgggcactgtga

SEQ ID NO: 764 - DNA, 26 bp, synthetic construct
  source 1..26: mol_type = other DNA
gcagattaaacccggccactttcagg

SEQ ID NO: 765 - DNA, 20 bp, synthetic construct
  source 1..20: mol_type = other DNA
ccctgaggagacagagacgg

SEQ ID NO: 766 - DNA, 15 bp, synthetic construct
  source 1..15: mol_type = other DNA
cctcgacggccagcc

SEQ ID NO: 767 - DNA, 20 bp, synthetic construct
  source 1..20: mol_type = other DNA
ctctgctacccatcaaacgc

SEQ ID NO: 768 - DNA, 17 bp, synthetic construct
  source 1..17: mol_type = other DNA
tcggaagcaaagctgag

SEQ ID NO: 769 - DNA, 20 bp, synthetic construct
  source 1..20: mol_type = other DNA
gagagagcatacctgggcaa

SEQ ID NO: 770 - DNA, 20 bp, synthetic construct
  source 1..20: mol_type = other DNA
ggccaaggaacacctaggta

SEQ ID NO: 771 - DNA, 21 bp, synthetic construct
  source 1..21: mol_type = other DNA
cacagggatgcttgaagatgg

SEQ ID NO: 772 - DNA, 20 bp, synthetic construct
  source 1..20: mol_type = other DNA
gaagctccacatcgaagacg

SEQ ID NO: 773 - DNA, 30 bp, synthetic construct
  source 1..30: mol_type = other DNA
ggaggaaaaactgtttcatacagaaggcgt

SEQ ID NO: 774 - protein, 9 aa, synthetic construct
VMAPRTLFL

SEQ ID NO: 775 - DNA, 65 bp, Homo sapiens
  source 1..65: mol_type = genomic DNA
aggtactccgagccgccgcgcgccactactcaccgtctcctggggagatggtttccacctgcact

SEQ ID NO: 776 - DNA, 66 bp, Homo sapiens
  source 1..66: mol_type = genomic DNA
gccgcgcgccactactcaccgtctcctggggagatggtttccacctgcactcccatggcggcggcg

SEQ ID NO: 777 - protein, 13 aa, Homo sapiens
GDGPSITEVQVGM

SEQ ID NO: 778 - RNA, 97 nt, synthetic construct; identical to SEQ ID NO: 321
  source 1..97: mol_type = other RNA

SEQ ID NO: 779 - RNA, 22 nt, synthetic construct
  source 1..22: mol_type = other RNA
ccacctgcactcccatggcggc

SEQ ID NO: 780 - RNA, 22 nt, synthetic construct
  source 1..22: mol_type = other RNA
ctttccatcttcaagcatccct

SEQ ID NO: 781 - RNA, 22 nt, synthetic construct
  source 1..22: mol_type = other RNA
ctgtcccgggaggaatcaaatt

SEQ ID NO: 782 - RNA, 22 nt, synthetic construct
  source 1..22: mol_type = other RNA
gattcctcccgggacagaaaca

SEQ ID NO: 783 - RNA, 22 nt, synthetic construct
  source 1..22: mol_type = other RNA
ctcccgggacagaaacaagccc

SEQ ID NO: 784 - RNA, 22 nt, synthetic construct
  source 1..22: mol_type = other RNA
atgctaggcaagcaggaggtga

SEQ ID NO: 785 - RNA, 22 nt, synthetic construct
  source 1..22: mol_type = other RNA
ggctctctgacccacactcatc

SEQ ID NO: 786 - RNA, 22 nt, synthetic construct
  source 1..22: mol_type = other RNA
tgcctatggtgccactgggcac

SEQ ID NO: 787 - RNA, 22 nt, synthetic construct
  source 1..22: mol_type = other RNA
tagaagctccacatcgaagacg

SEQ ID NO: 788 - RNA, 22 nt, synthetic construct
  source 1..22: mol_type = other RNA
cagttttagaagctccacatcg

SEQ ID NO: 789 - RNA, 22 nt, synthetic construct
  source 1..22: mol_type = other RNA
ctgtcattccagttttagaagc

SEQ ID NO: 790 - RNA, 22 nt, synthetic construct
  source 1..22: mol_type = other RNA
ccttacccaagaacagggagct

SEQ ID NO: 791 - RNA, 22 nt, synthetic construct
  source 1..22: mol_type = other RNA
atgtgcacatgtctggaggcac

SEQ ID NO: 792 - RNA, 22 nt, synthetic construct
  source 1..22: mol_type = other RNA
cacctgcactcccatggcggcg

SEQ ID NO: 793 - RNA, 22 nt, synthetic construct
  source 1..22: mol_type = other RNA
catcttcaagcatccctgtgaa

SEQ ID NO: 794 - RNA, 22 nt, synthetic construct
  source 1..22: mol_type = other RNA
attcctcccgggacagaaacaa

SEQ ID NO: 795 - RNA, 22 nt, synthetic construct
  source 1..22: mol_type = other RNA
tttccatcttcaagcatccctg

SEQ ID NO: 796 - RNA, 22 nt, synthetic construct
  source 1..22: mol_type = other RNA
tgtcccgggaggaatcaaattt

SEQ ID NO: 797 - RNA, 22 nt, synthetic construct
  source 1..22: mol_type = other RNA
agtttatgctaggcaagcagga

SEQ ID NO: 798 - RNA, 22 nt, synthetic construct
  source 1..22: mol_type = other RNA
tgctaggcaagcaggaggtgat

SEQ ID NO: 799 - RNA, 22 nt, synthetic construct
  source 1..22: mol_type = other RNA
gctctctgacccacactcatct

SEQ ID NO: 800 - RNA, 22 nt, synthetic construct
  source 1..22: mol_type = other RNA
gaagctccacatcgaagacgag

SEQ ID NO: 801 - RNA, 22 nt, synthetic construct
  source 1..22: mol_type = other RNA
agaagctccacatcgaagacga

SEQ ID NO: 802 - RNA, 22 nt, synthetic construct
  source 1..22: mol_type = other RNA
cttacccaagaacagggagcta

SEQ ID NO: 803 - RNA, 20 nt, synthetic construct
  source 1..20: mol_type = other RNA
gaaaccatctccccaggaga

SEQ ID NO: 804 - RNA, 20 nt, synthetic construct
  source 1..20: mol_type = other RNA
caggtggaaaccatctcccc

SEQ ID NO: 805 - DNA, 20 bp, Homo sapiens
  source 1..20: mol_type = genomic DNA
ctcaccgtctcctggggaga

SEQ ID NO: 806 - RNA, 76 nt, synthetic construct; identical to SEQ ID NO: 319
  source 1..76: mol_type = other RNA

SEQ ID NO: 807 - RNA, 76 nt, synthetic construct
  source 1..76: mol_type = other RNA
gttttagagctagaaatagcaagttaaaataaggctagtccgttatcaacttgaaaaagtgggaccgagtcggtcc

SEQ ID NO: 808 - RNA, 67 nt, synthetic construct
  source 1..67: mol_type = other RNA
agagctagaaatagcaagttaaaataaggctagtccgttatcaacttgaaaaagtggcaccgagtcg

SEQ ID NO: 809 - RNA, 116 nt, synthetic construct
  source 1..116: mol_type = other RNA
gaaaccatctccccaggagagttttagagctagaaatagcaagttaaaataaggctagtccgttatcaacttgaaaaagtggcaccgagtcggtgcctcgccgtctcctggggaga

SEQ ID NO: 810 - RNA, 117 nt, synthetic construct
  source 1..117: mol_type = other RNA
gaaaccatctccccaggagagttttagagctagaaatagcaagttaaaataaggctagtccgttatcaacttgaaaaagtggcaccgagtcggtgcctcgccgtctcctggggagat

SEQ ID NO: 811 - RNA, 118 nt, synthetic construct
  source 1..118: mol_type = other RNA
gaaaccatctccccaggagagttttagagctagaaatagcaagttaaaataaggctagtccgttatcaacttgaaaaagtggcaccgagtcggtgcctcgccgtctcctggggagatg

SEQ ID NO: 812 - RNA, 119 nt, synthetic construct
  source 1..119: mol_type = other RNA
gaaaccatctccccaggagagttttagagctagaaatagcaagttaaaataaggctagtccgttatcaacttgaaaaagtggcaccgagtcggtgcctcgccgtctcctggggagatgg

SEQ ID NO: 813 - RNA, 120 nt, synthetic construct
  source 1..120: mol_type = other RNA
gaaaccatctccccaggagagttttagagctagaaatagcaagttaaaataaggctagtccgttatcaacttgaaaaagtggcaccgagtcggtgcctcgccgtctcctggggagatggt

SEQ ID NO: 814 - RNA, 121 nt, synthetic construct
  source 1..121: mol_type = other RNA
gaaaccatctccccaggagagttttagagctagaaatagcaagttaaaataaggctagtccgttatcaacttgaaaaagtggcaccgagtcggtgcctcgccgtctcctggggagatggtt

SEQ ID NO: 815 - RNA, 117 nt, synthetic construct
  source 1..117: mol_type = other RNA
gaaaccatctccccaggagagttttagagctagaaatagcaagttaaaataaggctagtccgttatcaacttgaaaaagtggcaccgagtcggtgcactcgccgtctcctggggaga

SEQ ID NO: 816 - RNA, 118 nt, synthetic construct
  source 1..118: mol_type = other RNA
gaaaccatctccccaggagagttttagagctagaaatagcaagttaaaataaggctagtccgttatcaacttgaaaaagtggcaccgagtcggtgcactcgccgtctcctggggagat

SEQ ID NO: 817 - RNA, 119 nt, synthetic construct
  source 1..119: mol_type = other RNA
gaaaccatctccccaggagagttttagagctagaaatagcaagttaaaataaggctagtccgttatcaacttgaaaaagtggcaccgagtcggtgcactcgccgtctcctggggagatg

SEQ ID NO: 818 - RNA, 120 nt, synthetic construct
  source 1..120: mol_type = other RNA
gaaaccatctccccaggagagttttagagctagaaatagcaagttaaaataaggctagtccgttatcaacttgaaaaagtggcaccgagtcggtgcactcgccgtctcctggggagatgg

SEQ ID NO: 819 - RNA, 121 nt, synthetic construct
  source 1..121: mol_type = other RNA
gaaaccatctccccaggagagttttagagctagaaatagcaagttaaaataaggctagtccgttatcaacttgaaaaagtggcaccgagtcggtgcactcgccgtctcctggggagatggt

SEQ ID NO: 820 - RNA, 122 nt, synthetic construct
  source 1..122: mol_type = other RNA
gaaaccatctccccaggagagttttagagctagaaatagcaagttaaaataaggctagtccgttatcaacttgaaaaagtggcaccgagtcggtgcactcgccgtctcctggggagatggtt

SEQ ID NO: 821 - RNA, 118 nt, synthetic construct
  source 1..118: mol_type = other RNA
gaaaccatctccccaggagagttttagagctagaaatagcaagttaaaataaggctagtccgttatcaacttgaaaaagtggcaccgagtcggtgctactcgccgtctcctggggaga

SEQ ID NO: 822 - RNA, 119 nt, synthetic construct
  source 1..119: mol_type = other RNA
gaaaccatctccccaggagagttttagagctagaaatagcaagttaaaataaggctagtccgttatcaacttgaaaaagtggcaccgagtcggtgctactcgccgtctcctggggagat

SEQ ID NO: 823 - RNA, 120 nt, synthetic construct
  source 1..120: mol_type = other RNA
gaaaccatctccccaggagagttttagagctagaaatagcaagttaaaataaggctagtccgttatcaacttgaaaaagtggcaccgagtcggtgctactcgccgtctcctggggagatg

SEQ ID NO: 824 - RNA, 121 nt, synthetic construct
  source 1..121: mol_type = other RNA
gaaaccatctccccaggagagttttagagctagaaatagcaagttaaaataaggctagtccgttatcaacttgaaaaagtggcaccgagtcggtgctactcgccgtctcctggggagatgg

SEQ ID NO: 825 - RNA, 122 nt, synthetic construct
  source 1..122: mol_type = other RNA
gaaaccatctccccaggagagttttagagctagaaatagcaagttaaaataaggctagtccgttatcaacttgaaaaagtggcaccgagtcggtgctactcgccgtctcctggggagatggt

SEQ ID NO: 826 - RNA, 123 nt, synthetic construct
  source 1..123: mol_type = other RNA
gaaaccatctccccaggagagttttagagctagaaatagcaagttaaaataaggctagtccgttatcaacttgaaaaagtggcaccgagtcggtgctactcgccgtctcctggggagatggtt

SEQ ID NO: 827 - RNA, 119 nt, synthetic construct
  source 1..119: mol_type = other RNA
gaaaccatctccccaggagagttttagagctagaaatagcaagttaaaataaggctagtccgttatcaacttgaaaaagtggcaccgagtcggtgcctactcgccgtctcctggggaga

SEQ ID NO: 828 - RNA, 120 nt, synthetic construct
  source 1..120: mol_type = other RNA
gaaaccatctccccaggagagttttagagctagaaatagcaagttaaaataaggctagtccgttatcaacttgaaaaagtggcaccgagtcggtgcctactcgccgtctcctggggagat

SEQ ID NO: 829 - RNA, 121 nt, synthetic construct
  source 1..121: mol_type = other RNA
gaaaccatctccccaggagagttttagagctagaaatagcaagttaaaataaggctagtccgttatcaacttgaaaaagtggcaccgagtcggtgcctactcgccgtctcctggggagatg

SEQ ID NO: 830 - RNA, 122 nt, synthetic construct
  source 1..122: mol_type = other RNA
gaaaccatctccccaggagagttttagagctagaaatagcaagttaaaataaggctagtccgttatcaacttgaaaaagtggcaccgagtcggtgcctactcgccgtctcctggggagatgg

SEQ ID NO: 831 - RNA, 123 nt, synthetic construct
  source 1..123: mol_type = other RNA
gaaaccatctccccaggagagttttagagctagaaatagcaagttaaaataaggctagtccgttatcaacttgaaaaagtggcaccgagtcggtgcctactcgccgtctcctggggagatggt

SEQ ID NO: 832 - RNA, 124 nt, synthetic construct
  source 1..124: mol_type = other RNA
gaaaccatctccccaggagagttttagagctagaaatagcaagttaaaataaggctagtccgttatcaacttgaaaaagtggcaccgagtcggtgcctactcgccgtctcctggggagatggtt

SEQ ID NO: 833 - RNA, 120 nt, synthetic construct
  source 1..120: mol_type = other RNA
gaaaccatctccccaggagagttttagagctagaaatagcaagttaaaataaggctagtccgttatcaacttgaaaaagtggcaccgagtcggtgcactactcgccgtctcctggggaga

SEQ ID NO: 834 - RNA, 121 nt, synthetic construct
  source 1..121: mol_type = other RNA
gaaaccatctccccaggagagttttagagctagaaatagcaagttaaaataaggctagtccgttatcaacttgaaaaagtggcaccgagtcggtgcactactcgccgtctcctggggagat

SEQ ID NO: 835 - RNA, 122 nt, synthetic construct
  source 1..122: mol_type = other RNA
gaaaccatctccccaggagagttttagagctagaaatagcaagttaaaataaggctagtccgttatcaacttgaaaaagtggcaccgagtcggtgcactactcgccgtctcctggggagatg

SEQ ID NO: 836 - RNA, 123 nt, synthetic construct
  source 1..123: mol_type = other RNA
gaaaccatctccccaggagagttttagagctagaaatagcaagttaaaataaggctagtccgttatcaacttgaaaaagtggcaccgagtcggtgcactactcgccgtctcctggggagatgg

SEQ ID NO: 837 - RNA, 124 nt, synthetic construct
  source 1..124: mol_type = other RNA
gaaaccatctccccaggagagttttagagctagaaatagcaagttaaaataaggctagtccgttatcaacttgaaaaagtggcaccgagtcggtgcactactcgccgtctcctggggagatggt

SEQ ID NO: 838 - RNA, 125 nt, synthetic construct
  source 1..125: mol_type = other RNA
gaaaccatctccccaggagagttttagagctagaaatagcaagttaaaataaggctagtccgttatcaacttgaaaaagtggcaccgagtcggtgcactactcgccgtctcctggggagatggtt

SEQ ID NO: 839 - RNA, 121 nt, synthetic construct
  source 1..121: mol_type = other RNA
gaaaccatctccccaggagagttttagagctagaaatagcaagttaaaataaggctagtccgttatcaacttgaaaaagtggcaccgagtcggtgccactactcgccgtctcctggggaga

SEQ ID NO: 840 - RNA, 122 nt, synthetic construct
  source 1..122: mol_type = other RNA
gaaaccatctccccaggagagttttagagctagaaatagcaagttaaaataaggctagtccgttatcaacttgaaaaagtggcaccgagtcggtgccactactcgccgtctcctggggagat

SEQ ID NO: 841 - RNA, 123 nt, synthetic construct
  source 1..123: mol_type = other RNA
gaaaccatctccccaggagagttttagagctagaaatagcaagttaaaataaggctagtccgttatcaacttgaaaaagtggcaccgagtcggtgccactactcgccgtctcctggggagatg

SEQ ID NO: 842 - RNA, 124 nt, synthetic construct
  source 1..124: mol_type = other RNA
gaaaccatctccccaggagagttttagagctagaaatagcaagttaaaataaggctagtccgttatcaacttgaaaaagtggcaccgagtcggtgccactactcgccgtctcctggggagatgg

SEQ ID NO: 843 - RNA, 125 nt, synthetic construct
  source 1..125: mol_type = other RNA
gaaaccatctccccaggagagttttagagctagaaatagcaagttaaaataaggctagtccgttatcaacttgaaaaagtggcaccgagtcggtgccactactcgccgtctcctggggagatggt

SEQ ID NO: 844 - RNA, 126 nt, synthetic construct
  source 1..126: mol_type = other RNA
gaaaccatctccccaggagagttttagagctagaaatagcaagttaaaataaggctagtccgttatcaacttgaaaaagtggcaccgagtcggtgccactactcgccgtctcctggggagatggtt

SEQ ID NO: 845 - RNA, 122 nt, synthetic construct
  source 1..122: mol_type = other RNA
gaaaccatctccccaggagagttttagagctagaaatagcaagttaaaataaggctagtccgttatcaacttgaaaaagtggcaccgagtcggtgcccactactcgccgtctcctggggaga

SEQ ID NO: 846 - RNA, 123 nt, synthetic construct
  source 1..123: mol_type = other RNA
gaaaccatctccccaggagagttttagagctagaaatagcaagttaaaataaggctagtccgttatcaacttgaaaaagtggcaccgagtcggtgcccactactcgccgtctcctggggagat

SEQ ID NO: 847 - RNA, 124 nt, synthetic construct
  source 1..124: mol_type = other RNA
gaaaccatctccccaggagagttttagagctagaaatagcaagttaaaataaggctagtccgttatcaacttgaaaaagtggcaccgagtcggtgcccactactcgccgtctcctggggagatg

SEQ ID NO: 848 - RNA, 125 nt, synthetic construct
  source 1..125: mol_type = other RNA
gaaaccatctccccaggagagttttagagctagaaatagcaagttaaaataaggctagtccgttatcaacttgaaaaagtggcaccgagtcggtgcccactactcgccgtctcctggggagatgg

SEQ ID NO: 849 - RNA, 126 nt, synthetic construct
  source 1..126: mol_type = other RNA
gaaaccatctccccaggagagttttagagctagaaatagcaagttaaaataaggctagtccgttatcaacttgaaaaagtggcaccgagtcggtgcccactactcgccgtctcctggggagatggt

SEQ ID NO: 850 - RNA, 127 nt, synthetic construct
  source 1..127: mol_type = other RNA
gaaaccatctccccaggagagttttagagctagaaatagcaagttaaaataaggctagtccgttatcaacttgaaaaagtggcaccgagtcggtgcccactactcgccgtctcctggggagatggtt

SEQ ID NO: 851 - RNA, 123 nt, synthetic construct
  source 1..123: mol_type = other RNA
gaaaccatctccccaggagagttttagagctagaaatagcaagttaaaataaggctagtccgttatcaacttgaaaaagtggcaccgagtcggtgcgccactactcgccgtctcctggggaga

SEQ ID NO: 852 - RNA, 124 nt, synthetic construct
  source 1..124: mol_type = other RNA
gaaaccatctccccaggagagttttagagctagaaatagcaagttaaaataaggctagtccgttatcaacttgaaaaagtggcaccgagtcggtgcgccactactcgccgtctcctggggagat

SEQ ID NO: 853 - RNA, 125 nt, synthetic construct
  source 1..125: mol_type = other RNA
gaaaccatctccccaggagagttttagagctagaaatagcaagttaaaataaggctagtccgttatcaacttgaaaaagtggcaccgagtcggtgcgccactactcgccgtctcctggggagatg

SEQ ID NO: 854 - RNA, 126 nt, synthetic construct
  source 1..126: mol_type = other RNA
gaaaccatctccccaggagagttttagagctagaaatagcaagttaaaataaggctagtccgttatcaacttgaaaaagtggcaccgagtcggtgcgccactactcgccgtctcctggggagatgg

SEQ ID NO: 855 - RNA, 127 nt, synthetic construct
  source 1..127: mol_type = other RNA
gaaaccatctccccaggagagttttagagctagaaatagcaagttaaaataaggctagtccgttatcaacttgaaaaagtggcaccgagtcggtgcgccactactcgccgtctcctggggagatggt

SEQ ID NO: 856 - RNA, 128 nt, synthetic construct
  source 1..128: mol_type = other RNA
gaaaccatctccccaggagagttttagagctagaaatagcaagttaaaataaggctagtccgttatcaacttgaaaaagtggcaccgagtcggtgcgccactactcgccgtctcctggggagatggtt

SEQ ID NO: 857 - RNA, 124 nt, synthetic construct
  source 1..124: mol_type = other RNA
gaaaccatctccccaggagagttttagagctagaaatagcaagttaaaataaggctagtccgttatcaacttgaaaaagtggcaccgagtcggtgccgccactactcgccgtctcctggggaga

SEQ ID NO: 858 - RNA, 125 nt, synthetic construct
  source 1..125: mol_type = other RNA
gaaaccatctccccaggagagttttagagctagaaatagcaagttaaaataaggctagtccgttatcaacttgaaaaagtggcaccgagtcggtgccgccactactcgccgtctcctggggagat

SEQ ID NO: 859 - RNA, 126 nt, synthetic construct
  source 1..126: mol_type = other RNA
gaaaccatctccccaggagagttttagagctagaaatagcaagttaaaataaggctagtccgttatcaacttgaaaaagtggcaccgagtcggtgccgccactactcgccgtctcctggggagatg

SEQ ID NO: 860 - RNA, 127 nt, synthetic construct
  source 1..127: mol_type = other RNA
gaaaccatctccccaggagagttttagagctagaaatagcaagttaaaataaggctagtccgttatcaacttgaaaaagtggcaccgagtcggtgccgccactactcgccgtctcctggggagatgg

SEQ ID NO: 861 - RNA, 128 nt, synthetic construct
  source 1..128: mol_type = other RNA
gaaaccatctccccaggagagttttagagctagaaatagcaagttaaaataaggctagtccgttatcaacttgaaaaagtggcaccgagtcggtgccgccactactcgccgtctcctggggagatggt

SEQ ID NO: 862 - RNA, 129 nt, synthetic construct
  source 1..129: mol_type = other RNA
gaaaccatctccccaggagagttttagagctagaaatagcaagttaaaataaggctagtccgttatcaacttgaaaaagtggcaccgagtcggtgccgccactactcgccgtctcctggggagatggtt

SEQ ID NO: 863 - RNA, 125 nt, synthetic construct
  source 1..125: mol_type = other RNA
gaaaccatctccccaggagagttttagagctagaaatagcaagttaaaataaggctagtccgttatcaacttgaaaaagtggcaccgagtcggtgcgcgccactactcgccgtctcctggggaga

SEQ ID NO: 864 - RNA, 126 nt, synthetic construct
  source 1..126: mol_type = other RNA
gaaaccatctccccaggagagttttagagctagaaatagcaagttaaaataaggctagtccgttatcaacttgaaaaagtggcaccgagtcggtgcgcgccactactcgccgtctcctggggagat

SEQ ID NO: 865 - RNA, 127 nt, synthetic construct
  source 1..127: mol_type = other RNA
gaaaccatctccccaggagagttttagagctagaaatagcaagttaaaataaggctagtccgttatcaacttgaaaaagtggcaccgagtcggtgcgcgccactactcgccgtctcctggggagatg

SEQ ID NO: 866 - RNA, 128 nt, synthetic construct
  source 1..128: mol_type = other RNA
gaaaccatctccccaggagagttttagagctagaaatagcaagttaaaataaggctagtccgttatcaacttgaaaaagtggcaccgagtcggtgcgcgccactactcgccgtctcctggggagatgg

SEQ ID NO: 867 - RNA, 129 nt, synthetic construct
  source 1..129: mol_type = other RNA
gaaaccatctccccaggagagttttagagctagaaatagcaagttaaaataaggctagtccgttatcaacttgaaaaagtggcaccgagtcggtgcgcgccactactcgccgtctcctggggagatggt

SEQ ID NO: 868 - RNA, 130 nt, synthetic construct
  source 1..130: mol_type = other RNA
gaaaccatctccccaggagagttttagagctagaaatagcaagttaaaataaggctagtccgttatcaacttgaaaaagtggcaccgagtcggtgcgcgccactactcgccgtctcctggggagatggtt

SEQ ID NO: 869 - RNA, 126 nt, synthetic construct
  source 1..126: mol_type = other RNA
gaaaccatctccccaggagagttttagagctagaaatagcaagttaaaataaggctagtccgttatcaacttgaaaaagtggcaccgagtcggtgccgcgccactactcgccgtctcctggggaga

SEQ ID NO: 870 - RNA, 127 nt, synthetic construct
  source 1..127: mol_type = other RNA
gaaaccatctccccaggagagttttagagctagaaatagcaagttaaaataaggctagtccgttatcaacttgaaaaagtggcaccgagtcggtgccgcgccactactcgccgtctcctggggagat

SEQ ID NO: 871 - RNA, 128 nt, synthetic construct
  source 1..128: mol_type = other RNA
gaaaccatctccccaggagagttttagagctagaaatagcaagttaaaataaggctagtccgttatcaacttgaaaaagtggcaccgagtcggtgccgcgccactactcgccgtctcctggggagatg

SEQ ID NO: 872 - RNA, 129 nt, synthetic construct
  source 1..129: mol_type = other RNA
gaaaccatctccccaggagagttttagagctagaaatagcaagttaaaataaggctagtccgttatcaacttgaaaaagtggcaccgagtcggtgccgcgccactactcgccgtctcctggggagatgg

SEQ ID NO: 873 - RNA, 130 nt, synthetic construct
  source 1..130: mol_type = other RNA
gaaaccatctccccaggagagttttagagctagaaatagcaagttaaaataaggctagtccgttatcaacttgaaaaagtggcaccgagtcggtgccgcgccactactcgccgtctcctggggagatggt

SEQ ID NO: 874 - RNA, 131 nt, synthetic construct
  source 1..131: mol_type = other RNA
gaaaccatctccccaggagagttttagagctagaaatagcaagttaaaataaggctagtccgttatcaacttgaaaaagtggcaccgagtcggtgccgcgccactactcgccgtctcctggggagatggtt

SEQ ID NO: 875 - RNA, 127 nt, synthetic construct
  source 1..127: mol_type = other RNA
gaaaccatctccccaggagagttttagagctagaaatagcaagttaaaataaggctagtccgttatcaacttgaaaaagtggcaccgagtcggtgcgcgcgccactactcgccgtctcctggggaga

SEQ ID NO: 876 - RNA, 128 nt, synthetic construct
  source 1..128: mol_type = other RNA
gaaaccatctccccaggagagttttagagctagaaatagcaagttaaaataaggctagtccgttatcaacttgaaaaagtggcaccgagtcggtgcgcgcgccactactcgccgtctcctggggagat

SEQ ID NO: 877 - RNA, 129 nt, synthetic construct
  source 1..129: mol_type = other RNA
gaaaccatctccccaggagagttttagagctagaaatagcaagttaaaataaggctagtccgttatcaacttgaaaaagtggcaccgagtcggtgcgcgcgccactactcgccgtctcctggggagatg

SEQ ID NO: 878 - RNA, 130 nt, synthetic construct
  source 1..130: mol_type = other RNA
gaaaccatctccccaggagagttttagagctagaaatagcaagttaaaataaggctagtccgttatcaacttgaaaaagtggcaccgagtcggtgcgcgcgccactactcgccgtctcctggggagatgg

SEQ ID NO: 879 - RNA, 131 nt, synthetic construct
  source 1..131: mol_type = other RNA
gaaaccatctccccaggagagttttagagctagaaatagcaagttaaaataaggctagtccgttatcaacttgaaaaagtggcaccgagtcggtgcgcgcgccactactcgccgtctcctggggagatggt

SEQ ID NO: 880 - RNA, 132 nt, synthetic construct
  source 1..132: mol_type = other RNA
gaaaccatctccccaggagagttttagagctagaaatagcaagttaaaataaggctagtccgttatcaacttgaaaaagtggcaccgagtcggtgcgcgcgccactactcgccgtctcctggggagatggtt

SEQ ID NO: 881 - RNA, 128 nt, synthetic construct
  source 1..128: mol_type = other RNA
gaaaccatctccccaggagagttttagagctagaaatagcaagttaaaataaggctagtccgttatcaacttgaaaaagtggcaccgagtcggtgccgcgcgccactactcgccgtctcctggggaga

SEQ ID NO: 882 - RNA, 129 nt, synthetic construct
  source 1..129: mol_type = other RNA
gaaaccatctccccaggagagttttagagctagaaatagcaagttaaaataaggctagtccgttatcaacttgaaaaagtggcaccgagtcggtgccgcgcgccactactcgccgtctcctggggagat

SEQ ID NO: 883 - RNA, 130 nt, synthetic construct
  source 1..130: mol_type = other RNA
gaaaccatctccccaggagagttttagagctagaaatagcaagttaaaataaggctagtccgttatcaacttgaaaaagtggcaccgagtcggtgccgcgcgccactactcgccgtctcctggggagatg

SEQ ID NO: 884 - RNA, 131 nt, synthetic construct
  source 1..131: mol_type = other RNA
gaaaccatctccccaggagagttttagagctagaaatagcaagttaaaataaggctagtccgttatcaacttgaaaaagtggcaccgagtcggtgccgcgcgccactactcgccgtctcctggggagatgg

SEQ ID NO: 885 - RNA, 132 nt, synthetic construct
  source 1..132: mol_type = other RNA
gaaaccatctccccaggagagttttagagctagaaatagcaagttaaaataaggctagtccgttatcaacttgaaaaagtggcaccgagtcggtgccgcgcgccactactcgccgtctcctggggagatggt

SEQ ID NO: 886 - RNA, 133 nt, synthetic construct
  source 1..133: mol_type = other RNA
gaaaccatctccccaggagagttttagagctagaaatagcaagttaaaataaggctagtccgttatcaacttgaaaaagtggcaccgagtcggtgccgcgcgccactactcgccgtctcctggggagatggtt

SEQ ID NO: 887 - RNA, 129 nt, synthetic construct
  source 1..129: mol_type = other RNA
gaaaccatctccccaggagagttttagagctagaaatagcaagttaaaataaggctagtccgttatcaacttgaaaaagtggcaccgagtcggtgcccgcgcgccactactcgccgtctcctggggaga

SEQ ID NO: 888 - RNA, 130 nt, synthetic construct
  source 1..130: mol_type = other RNA
gaaaccatctccccaggagagttttagagctagaaatagcaagttaaaataaggctagtccgttatcaacttgaaaaagtggcaccgagtcggtgcccgcgcgccactactcgccgtctcctggggagat

SEQ ID NO: 889 - RNA, 131 nt, synthetic construct
  source 1..131: mol_type = other RNA
gaaaccatctccccaggagagttttagagctagaaatagcaagttaaaataaggctagtccgttatcaacttgaaaaagtggcaccgagtcggtgcccgcgcgccactactcgccgtctcctggggagatg

SEQ ID NO: 890 - RNA, 132 nt, synthetic construct
  source 1..132: mol_type = other RNA
gaaaccatctccccaggagagttttagagctagaaatagcaagttaaaataaggctagtccgttatcaacttgaaaaagtggcaccgagtcggtgcccgcgcgccactactcgccgtctcctggggagatgg

SEQ ID NO: 891 - RNA, 133 nt, synthetic construct
  source 1..133: mol_type = other RNA
gaaaccatctccccaggagagttttagagctagaaatagcaagttaaaataaggctagtccgttatcaacttgaaaaagtggcaccgagtcggtgcccgcgcgccactactcgccgtctcctggggagatggt

SEQ ID NO: 892 - RNA, 134 nt, synthetic construct
  source 1..134: mol_type = other RNA
gaaaccatctccccaggagagttttagagctagaaatagcaagttaaaataaggctagtccgttatcaacttgaaaaagtggcaccgagtcggtgcccgcgcgccactactcgccgtctcctggggagatggtt

SEQ ID NO: 893 - RNA, 130 nt, synthetic construct
  source 1..130: mol_type = other RNA
gaaaccatctccccaggagagttttagagctagaaatagcaagttaaaataaggctagtccgttatcaacttgaaaaagtggcaccgagtcggtgcgccgcgcgccactactcgccgtctcctggggaga

SEQ ID NO: 894 - RNA, 131 nt, synthetic construct
  source 1..131: mol_type = other RNA
gaaaccatctccccaggagagttttagagctagaaatagcaagttaaaataaggctagtccgttatcaacttgaaaaagtggcaccgagtcggtgcgccgcgcgccactactcgccgtctcctggggagat

SEQ ID NO: 895 - RNA, 132 nt, synthetic construct
  source 1..132: mol_type = other RNA
gaaaccatctccccaggagagttttagagctagaaatagcaagttaaaataaggctagtccgttatcaacttgaaaaagtggcaccgagtcggtgcgccgcgcgccactactcgccgtctcctggggagatg

SEQ ID NO: 896 - RNA, 133 nt, synthetic construct
  source 1..133: mol_type = other RNA
gaaaccatctccccaggagagttttagagctagaaatagcaagttaaaataaggctagtccgttatcaacttgaaaaagtggcaccgagtcggtgcgccgcgcgccactactcgccgtctcctggggagatgg

SEQ ID NO: 897 - RNA, 134 nt, synthetic construct
  source 1..134: mol_type = other RNA
gaaaccatctccccaggagagttttagagctagaaatagcaagttaaaataaggctagtccgttatcaacttgaaaaagtggcaccgagtcggtgcgccgcgcgccactactcgccgtctcctggggagatggt

SEQ ID NO: 898 - RNA, 135 nt, synthetic construct
  source 1..135: mol_type = other RNA
gaaaccatctccccaggagagttttagagctagaaatagcaagttaaaataaggctagtccgttatcaacttgaaaaagtggcaccgagtcggtgcgccgcgcgccactactcgccgtctcctggggagatggtt

SEQ ID NO: 899 - RNA, 131 nt, synthetic construct
  source 1..131: mol_type = other RNA
gaaaccatctccccaggagagttttagagctagaaatagcaagttaaaataaggctagtccgttatcaacttgaaaaagtggcaccgagtcggtgccgccgcgcgccactactcgccgtctcctggggaga

SEQ ID NO: 900 - RNA, 132 nt, synthetic construct
  source 1..132: mol_type = other RNA
gaaaccatctccccaggagagttttagagctagaaatagcaagttaaaataaggctagtccgttatcaacttgaaaaagtggcaccgagtcggtgccgccgcgcgccactactcgccgtctcctggggagat

SEQ ID NO: 901 - RNA, 133 nt, synthetic construct
  source 1..133: mol_type = other RNA
gaaaccatctccccaggagagttttagagctagaaatagcaagttaaaataaggctagtccgttatcaacttgaaaaagtggcaccgagtcggtgccgccgcgcgccactactcgccgtctcctggggagatg

SEQ ID NO: 902 - RNA, 134 nt, synthetic construct
  source 1..134: mol_type = other RNA
gaaaccatctccccaggagagttttagagctagaaatagcaagttaaaataaggctagtccgttatcaacttgaaaaagtggcaccgagtcggtgccgccgcgcgccactactcgccgtctcctggggagatgg

SEQ ID NO: 903 - RNA, 135 nt, synthetic construct
  source 1..135: mol_type = other RNA
gaaaccatctccccaggagagttttagagctagaaatagcaagttaaaataaggctagtccgttatcaacttgaaaaagtggcaccgagtcggtgccgccgcgcgccactactcgccgtctcctggggagatggt

SEQ ID NO: 904 - RNA, 136 nt, synthetic construct
  source 1..136: mol_type = other RNA
gaaaccatctccccaggagagttttagagctagaaatagcaagttaaaataaggctagtccgttatcaacttgaaaaagtggcaccgagtcggtgccgccgcgcgccactactcgccgtctcctggggagatggtt

SEQ ID NO: 905 - RNA, 132 nt, synthetic construct
  source 1..132: mol_type = other RNA
gaaaccatctccccaggagagttttagagctagaaatagcaagttaaaataaggctagtccgttatcaacttgaaaaagtggcaccgagtcggtgcccgccgcgcgccactactcgccgtctcctggggaga

SEQ ID NO: 906 - RNA, 133 nt, synthetic construct
  source 1..133: mol_type = other RNA
gaaaccatctccccaggagagttttagagctagaaatagcaagttaaaataaggctagtccgttatcaacttgaaaaagtggcaccgagtcggtgcccgccgcgcgccactactcgccgtctcctggggagat

SEQ ID NO: 907 - RNA, 134 nt, synthetic construct
  source 1..134: mol_type = other RNA
gaaaccatctccccaggagagttttagagctagaaatagcaagttaaaataaggctagtccgttatcaacttgaaaaagtggcaccgagtcggtgcccgccgcgcgccactactcgccgtctcctggggagatg

SEQ ID NO: 908 - RNA, 135 nt, synthetic construct
  source 1..135: mol_type = other RNA
gaaaccatctccccaggagagttttagagctagaaatagcaagttaaaataaggctagtccgttatcaacttgaaaaagtggcaccgagtcggtgcccgccgcgcgccactactcgccgtctcctggggagatgg

SEQ ID NO: 909 - RNA, 136 nt, synthetic construct
  source 1..136: mol_type = other RNA
gaaaccatctccccaggagagttttagagctagaaatagcaagttaaaataaggctagtccgttatcaacttgaaaaagtggcaccgagtcggtgcccgccgcgcgccactactcgccgtctcctggggagatggt

SEQ ID NO: 910 - RNA, 137 nt, synthetic construct
  source 1..137: mol_type = other RNA
gaaaccatctccccaggagagttttagagctagaaatagcaagttaaaataaggctagtccgttatcaacttgaaaaagtggcaccgagtcggtgcccgccgcgcgccactactcgccgtctcctggggagatggtt

SEQ ID NO: 911 - RNA, 133 nt, synthetic construct
  source 1..133: mol_type = other RNA
gaaaccatctccccaggagagttttagagctagaaatagcaagttaaaataaggctagtccgttatcaacttgaaaaagtggcaccgagtcggtgcgccgccgcgcgccactactcgccgtctcctggggaga

SEQ ID NO: 912 - RNA, 134 nt, synthetic construct
  source 1..134: mol_type = other RNA
gaaaccatctccccaggagagttttagagctagaaatagcaagttaaaataaggctagtccgttatcaacttgaaaaagtggcaccgagtcggtgcgccgccgcgcgccactactcgccgtctcctggggagat

SEQ ID NO: 913 - RNA, 135 nt, synthetic construct
  source 1..135: mol_type = other RNA
gaaaccatctccccaggagagttttagagctagaaatagcaagttaaaataaggctagtccgttatcaacttgaaaaagtggcaccgagtcggtgcgccgccgcgcgccactactcgccgtctcctggggagatg

SEQ ID NO: 914 - RNA, 136 nt, synthetic construct
  source 1..136: mol_type = other RNA
gaaaccatctccccaggagagttttagagctagaaatagcaagttaaaataaggctagtccgttatcaacttgaaaaagtggcaccgagtcggtgcgccgccgcgcgccactactcgccgtctcctggggagatgg

SEQ ID NO: 915 - RNA, 137 nt, synthetic construct
  source 1..137: mol_type = other RNA
gaaaccatctccccaggagagttttagagctagaaatagcaagttaaaataaggctagtccgttatcaacttgaaaaagtggcaccgagtcggtgcgccgccgcgcgccactactcgccgtctcctggggagatggt

SEQ ID NO: 916 - RNA, 138 nt, synthetic construct
  source 1..138: mol_type = other RNA
gaaaccatctccccaggagagttttagagctagaaatagcaagttaaaataaggctagtccgttatcaacttgaaaaagtggcaccgagtcggtgcgccgccgcgcgccactactcgccgtctcctggggagatggtt

SEQ ID NO: 917 - RNA, 134 nt, synthetic construct
  source 1..134: mol_type = other RNA
gaaaccatctccccaggagagttttagagctagaaatagcaagttaaaataaggctagtccgttatcaacttgaaaaagtggcaccgagtcggtgcagccgccgcgcgccactactcgccgtctcctggggaga

SEQ ID NO: 918 - RNA, 135 nt, synthetic construct
  source 1..135: mol_type = other RNA
gaaaccatctccccaggagagttttagagctagaaatagcaagttaaaataaggctagtccgttatcaacttgaaaaagtggcaccgagtcggtgcagccgccgcgcgccactactcgccgtctcctggggagat

SEQ ID NO: 919 - RNA, 136 nt, synthetic construct
  source 1..136: mol_type = other RNA
gaaaccatctccccaggagagttttagagctagaaatagcaagttaaaataaggctagtccgttatcaacttgaaaaagtggcaccgagtcggtgcagccgccgcgcgccactactcgccgtctcctggggagatg

SEQ ID NO: 920 - RNA, 137 nt, synthetic construct
  source 1..137: mol_type = other RNA
gaaaccatctccccaggagagttttagagctagaaatagcaagttaaaataaggctagtccgttatcaacttgaaaaagtggcaccgagtcggtgcagccgccgcgcgccactactcgccgtctcctggggagatgg

SEQ ID NO: 921 - RNA, 138 nt, synthetic construct
  source 1..138: mol_type = other RNA
gaaaccatctccccaggagagttttagagctagaaatagcaagttaaaataaggctagtccgttatcaacttgaaaaagtggcaccgagtcggtgcagccgccgcgcgccactactcgccgtctcctggggagatggt

SEQ ID NO: 922 - RNA, 139 nt, synthetic construct
  source 1..139: mol_type = other RNA
gaaaccatctccccaggagagttttagagctagaaatagcaagttaaaataaggctagtccgttatcaacttgaaaaagtggcaccgagtcggtgcagccgccgcgcgccactactcgccgtctcctggggagatggtt

SEQ ID NO: 923 - RNA, 135 nt, synthetic construct
  source 1..135: mol_type = other RNA
gaaaccatctccccaggagagttttagagctagaaatagcaagttaaaataaggctagtccgttatcaacttgaaaaagtggcaccgagtcggtgcgagccgccgcgcgccactactcgccgtctcctggggaga

SEQ ID NO: 924 - RNA, 136 nt, synthetic construct
  source 1..136: mol_type = other RNA
gaaaccatctccccaggagagttttagagctagaaatagcaagttaaaataaggctagtccgttatcaacttgaaaaagtggcaccgagtcggtgcgagccgccgcgcgccactactcgccgtctcctggggagat

SEQ ID NO: 925 - RNA, 137 nt, synthetic construct
  source 1..137: mol_type = other RNA
gaaaccatctccccaggagagttttagagctagaaatagcaagttaaaataaggctagtccgttatcaacttgaaaaagtggcaccgagtcggtgcgagccgccgcgcgccactactcgccgtctcctggggagatg

SEQ ID NO: 926 - RNA, 138 nt, synthetic construct
  source 1..138: mol_type = other RNA
gaaaccatctccccaggagagttttagagctagaaatagcaagttaaaataaggctagtccgttatcaacttgaaaaagtggcaccgagtcggtgcgagccgccgcgcgccactactcgccgtctcctggggagatgg

SEQ ID NO: 927 - RNA, 139 nt, synthetic construct
  source 1..139: mol_type = other RNA
gaaaccatctccccaggagagttttagagctagaaatagcaagttaaaataaggctagtccgttatcaacttgaaaaagtggcaccgagtcggtgcgagccgccgcgcgccactactcgccgtctcctggggagatggt

SEQ ID NO: 928 - RNA, 140 nt, synthetic construct
  source 1..140: mol_type = other RNA
gaaaccatctccccaggagagttttagagctagaaatagcaagttaaaataaggctagtccgttatcaacttgaaaaagtggcaccgagtcggtgcgagccgccgcgcgccactactcgccgtctcctggggagatggtt

SEQ ID NO: 929 - RNA, 136 nt, synthetic construct
  source 1..136: mol_type = other RNA
gaaaccatctccccaggagagttttagagctagaaatagcaagttaaaataaggctagtccgttatcaacttgaaaaagtggcaccgagtcggtgccgagccgccgcgcgccactactcgccgtctcctggggaga

SEQ ID NO: 930 - RNA, 137 nt, synthetic construct
  source 1..137: mol_type = other RNA
gaaaccatctccccaggagagttttagagctagaaatagcaagttaaaataaggctagtccgttatcaacttgaaaaagtggcaccgagtcggtgccgagccgccgcgcgccactactcgccgtctcctggggagat

SEQ ID NO: 931 - RNA, 138 nt, synthetic construct
  source 1..138: mol_type = other RNA
gaaaccatctccccaggagagttttagagctagaaatagcaagttaaaataaggctagtccgttatcaacttgaaaaagtggcaccgagtcggtgccgagccgccgcgcgccactactcgccgtctcctggggagatg

SEQ ID NO: 932 - RNA, 139 nt, synthetic construct
  source 1..139: mol_type = other RNA
gaaaccatctccccaggagagttttagagctagaaatagcaagttaaaataaggctagtccgttatcaacttgaaaaagtggcaccgagtcggtgccgagccgccgcgcgccactactcgccgtctcctggggagatgg

SEQ ID NO: 933 - RNA, 140 nt, synthetic construct
  source 1..140: mol_type = other RNA
gaaaccatctccccaggagagttttagagctagaaatagcaagttaaaataaggctagtccgttatcaacttgaaaaagtggcaccgagtcggtgccgagccgccgcgcgccactactcgccgtctcctggggagatggt

SEQ ID NO: 934 - RNA, 141 nt, synthetic construct
  source 1..141: mol_type = other RNA
gaaaccatctccccaggagagttttagagctagaaatagcaagttaaaataaggctagtccgttatcaacttgaaaaagtggcaccgagtcggtgccgagccgccgcgcgccactactcgccgtctcctggggagatggtt

SEQ ID NO: 935 - RNA, 120 nt, synthetic construct
  source 1..120: mol_type = other RNA
caggtggaaaccatctccccgttttagagctagaaatagcaagttaaaataaggctagtccgttatcaacttgaaaaagtggcaccgagtcggtgccgccgtctcctggggagatggttt

SEQ ID NO: 936 - RNA, 121 nt, synthetic construct
  source 1..121: mol_type = other RNA
caggtggaaaccatctccccgttttagagctagaaatagcaagttaaaataaggctagtccgttatcaacttgaaaaagtggcaccgagtcggtgccgccgtctcctggggagatggtttc

SEQ ID NO: 937 - RNA, 122 nt, synthetic construct
  source 1..122: mol_type = other RNA
caggtggaaaccatctccccgttttagagctagaaatagcaagttaaaataaggctagtccgttatcaacttgaaaaagtggcaccgagtcggtgccgccgtctcctggggagatggtttcc

SEQ ID NO: 938 - RNA, 123 nt, synthetic construct
  source 1..123: mol_type = other RNA
caggtggaaaccatctccccgttttagagctagaaatagcaagttaaaataaggctagtccgttatcaacttgaaaaagtggcaccgagtcggtgccgccgtctcctggggagatggtttcca

SEQ ID NO: 939 - RNA, 124 nt, synthetic construct
  source 1..124: mol_type = other RNA
caggtggaaaccatctccccgttttagagctagaaatagcaagttaaaataaggctagtccgttatcaacttgaaaaagtggcaccgagtcggtgccgccgtctcctggggagatggtttccac

SEQ ID NO: 940 - RNA, 125 nt, synthetic construct
  source 1..125: mol_type = other RNA
caggtggaaaccatctccccgttttagagctagaaatagcaagttaaaataaggctagtccgttatcaacttgaaaaagtggcaccgagtcggtgccgccgtctcctggggagatggtttccacc

SEQ ID NO: 941 - RNA, 121 nt, synthetic construct
  source 1..121: mol_type = other RNA
caggtggaaaccatctccccgttttagagctagaaatagcaagttaaaataaggctagtccgttatcaacttgaaaaagtggcaccgagtcggtgctcgccgtctcctggggagatggttt

SEQ ID NO: 942 - RNA, 122 nt, synthetic construct
  source 1..122: mol_type = other RNA
caggtggaaaccatctccccgttttagagctagaaatagcaagttaaaataaggctagtccgttatcaacttgaaaaagtggcaccgagtcggtgctcgccgtctcctggggagatggtttc

SEQ ID NO: 943 - RNA, 123 nt, synthetic construct
  source 1..123: mol_type = other RNA
caggtggaaaccatctccccgttttagagctagaaatagcaagttaaaataaggctagtccgttatcaacttgaaaaagtggcaccgagtcggtgctcgccgtctcctggggagatggtttcc

SEQ ID NO: 944 - RNA, 124 nt, synthetic construct
  source 1..124: mol_type = other RNA
caggtggaaaccatctccccgttttagagctagaaatagcaagttaaaataaggctagtccgttatcaacttgaaaaagtggcaccgagtcggtgctcgccgtctcctggggagatggtttcca

SEQ ID NO: 945 - RNA, 125 nt, synthetic construct
  source 1..125: mol_type = other RNA
caggtggaaaccatctccccgttttagagctagaaatagcaagttaaaataaggctagtccgttatcaacttgaaaaagtggcaccgagtcggtgctcgccgtctcctggggagatggtttccac

SEQ ID NO: 946 - RNA, 126 nt, synthetic construct
  source 1..126: mol_type = other RNA
caggtggaaaccatctccccgttttagagctagaaatagcaagttaaaataaggctagtccgttatcaacttgaaaaagtggcaccgagtcggtgctcgccgtctcctggggagatggtttccacc

SEQ ID NO: 947 - RNA, 122 nt, synthetic construct
  source 1..122: mol_type = other RNA
caggtggaaaccatctccccgttttagagctagaaatagcaagttaaaataaggctagtccgttatcaacttgaaaaagtggcaccgagtcggtgcctcgccgtctcctggggagatggttt

SEQ ID NO: 948 - RNA, 123 nt, synthetic construct
  source 1..123: mol_type = other RNA
caggtggaaaccatctccccgttttagagctagaaatagcaagttaaaataaggctagtccgttatcaacttgaaaaagtggcaccgagtcggtgcctcgccgtctcctggggagatggtttc

SEQ ID NO: 949 - RNA, 124 nt, synthetic construct
  source 1..124: mol_type = other RNA
caggtggaaaccatctccccgttttagagctagaaatagcaagttaaaataaggctagtccgttatcaacttgaaaaagtggcaccgagtcggtgcctcgccgtctcctggggagatggtttcc

SEQ ID NO: 950 - RNA, 125 nt, synthetic construct
  source 1..125: mol_type = other RNA
caggtggaaaccatctccccgttttagagctagaaatagcaagttaaaataaggctagtccgttatcaacttgaaaaagtggcaccgagtcggtgcctcgccgtctcctggggagatggtttcca

SEQ ID NO: 951 - RNA, 126 nt, synthetic construct
  source 1..126: mol_type = other RNA
caggtggaaaccatctccccgttttagagctagaaatagcaagttaaaataaggctagtccgttatcaacttgaaaaagtggcaccgagtcggtgcctcgccgtctcctggggagatggtttccac

SEQ ID NO: 952 - RNA, 127 nt, synthetic construct
  source 1..127: mol_type = other RNA
caggtggaaaccatctccccgttttagagctagaaatagcaagttaaaataaggctagtccgttatcaacttgaaaaagtggcaccgagtcggtgcctcgccgtctcctggggagatggtttccacc

SEQ ID NO: 953 - RNA, 123 nt, synthetic construct
  source 1..123: mol_type = other RNA
caggtggaaaccatctccccgttttagagctagaaatagcaagttaaaataaggctagtccgttatcaacttgaaaaagtggcaccgagtcggtgcactcgccgtctcctggggagatggttt

SEQ ID NO: 954 - RNA, 124 nt, synthetic construct
  source 1..124: mol_type = other RNA
caggtggaaaccatctccccgttttagagctagaaatagcaagttaaaataaggctagtccgttatcaacttgaaaaagtggcaccgagtcggtgcactcgccgtctcctggggagatggtttc

SEQ ID NO: 955 - RNA, 125 nt, synthetic construct
  source 1..125: mol_type = other RNA
caggtggaaaccatctccccgttttagagctagaaatagcaagttaaaataaggctagtccgttatcaacttgaaaaagtggcaccgagtcggtgcactcgccgtctcctggggagatggtttcc

SEQ ID NO: 956 - RNA, 126 nt, synthetic construct
  source 1..126: mol_type = other RNA
caggtggaaaccatctccccgttttagagctagaaatagcaagttaaaataaggctagtccgttatcaacttgaaaaagtggcaccgagtcggtgcactcgccgtctcctggggagatggtttcca

SEQ ID NO: 957 - RNA, 127 nt, synthetic construct
  source 1..127: mol_type = other RNA
caggtggaaaccatctccccgttttagagctagaaatagcaagttaaaataaggctagtccgttatcaacttgaaaaagtggcaccgagtcggtgcactcgccgtctcctggggagatggtttccac

SEQ ID NO: 958 - RNA, 128 nt, synthetic construct
  source 1..128: mol_type = other RNA
caggtggaaaccatctccccgttttagagctagaaatagcaagttaaaataaggctagtccgttatcaacttgaaaaagtggcaccgagtcggtgcactcgccgtctcctggggagatggtttccacc

SEQ ID NO: 959 - RNA, 124 nt, synthetic construct
  source 1..124: mol_type = other RNA
caggtggaaaccatctccccgttttagagctagaaatagcaagttaaaataaggctagtccgttatcaacttgaaaaagtggcaccgagtcggtgctactcgccgtctcctggggagatggttt

SEQ ID NO: 960 - RNA, 125 nt, synthetic construct
  source 1..125: mol_type = other RNA
caggtggaaaccatctccccgttttagagctagaaatagcaagttaaaataaggctagtccgttatcaacttgaaaaagtggcaccgagtcggtgctactcgccgtctcctggggagatggtttc

SEQ ID NO: 961 - RNA, 126 nt, synthetic construct
  source 1..126: mol_type = other RNA
caggtggaaaccatctccccgttttagagctagaaatagcaagttaaaataaggctagtccgttatcaacttgaaaaagtggcaccgagtcggtgctactcgccgtctcctggggagatggtttcc

SEQ ID NO: 962 - RNA, 127 nt, synthetic construct
  source 1..127: mol_type = other RNA
caggtggaaaccatctccccgttttagagctagaaatagcaagttaaaataaggctagtccgttatcaacttgaaaaagtggcaccgagtcggtgctactcgccgtctcctggggagatggtttcca

SEQ ID NO: 963 - RNA, 128 nt, synthetic construct
  source 1..128: mol_type = other RNA
caggtggaaaccatctccccgttttagagctagaaatagcaagttaaaataaggctagtccgttatcaacttgaaaaagtggcaccgagtcggtgctactcgccgtctcctggggagatggtttccac

SEQ ID NO: 964 - RNA, 129 nt, synthetic construct
  source 1..129: mol_type = other RNA
caggtggaaaccatctccccgttttagagctagaaatagcaagttaaaataaggctagtccgttatcaacttgaaaaagtggcaccgagtcggtgctactcgccgtctcctggggagatggtttccacc

SEQ ID NO: 965 - RNA, 125 nt, synthetic construct
  source 1..125: mol_type = other RNA
caggtggaaaccatctccccgttttagagctagaaatagcaagttaaaataaggctagtccgttatcaacttgaaaaagtggcaccgagtcggtgcctactcgccgtctcctggggagatggttt

SEQ ID NO: 966 - RNA, 126 nt, synthetic construct
  source 1..126: mol_type = other RNA
caggtggaaaccatctccccgttttagagctagaaatagcaagttaaaataaggctagtccgttatcaacttgaaaaagtggcaccgagtcggtgcctactcgccgtctcctggggagatggtttc

SEQ ID NO: 967 - RNA, 127 nt, synthetic construct
  source 1..127: mol_type = other RNA
caggtggaaaccatctccccgttttagagctagaaatagcaagttaaaataaggctagtccgttatcaacttgaaaaagtggcaccgagtcggtgcctactcgccgtctcctggggagatggtttcc

SEQ ID NO: 968 - RNA, 128 nt, synthetic construct
  source 1..128: mol_type = other RNA
caggtggaaaccatctccccgttttagagctagaaatagcaagttaaaataaggctagtccgttatcaacttgaaaaagtggcaccgagtcggtgcctactcgccgtctcctggggagatggtttcca

SEQ ID NO: 969 - RNA, 129 nt, synthetic construct
  source 1..129: mol_type = other RNA
caggtggaaaccatctccccgttttagagctagaaatagcaagttaaaataaggctagtccgttatcaacttgaaaaagtggcaccgagtcggtgcctactcgccgtctcctggggagatggtttccac

SEQ ID NO: 970 - RNA, 130 nt, synthetic construct
  source 1..130: mol_type = other RNA
caggtggaaaccatctccccgttttagagctagaaatagcaagttaaaataaggctagtccgttatcaacttgaaaaagtggcaccgagtcggtgcctactcgccgtctcctggggagatggtttccacc

SEQ ID NO: 971 - RNA, 126 nt, synthetic construct
  source 1..126: mol_type = other RNA
caggtggaaaccatctccccgttttagagctagaaatagcaagttaaaataaggctagtccgttatcaacttgaaaaagtggcaccgagtcggtgcactactcgccgtctcctggggagatggttt

SEQ ID NO: 972 - RNA, 127 nt, synthetic construct
  source 1..127: mol_type = other RNA
caggtggaaaccatctccccgttttagagctagaaatagcaagttaaaataaggctagtccgttatcaacttgaaaaagtggcaccgagtcggtgcactactcgccgtctcctggggagatggtttc

SEQ ID NO: 973 - RNA, 128 nt, synthetic construct
  source 1..128: mol_type = other RNA
caggtggaaaccatctccccgttttagagctagaaatagcaagttaaaataaggctagtccgttatcaacttgaaaaagtggcaccgagtcggtgcactactcgccgtctcctggggagatggtttcc

SEQ ID NO: 974 - RNA, 129 nt, synthetic construct
  source 1..129: mol_type = other RNA
caggtggaaaccatctccccgttttagagctagaaatagcaagttaaaataaggctagtccgttatcaacttgaaaaagtggcaccgagtcggtgcactactcgccgtctcctggggagatggtttcca

SEQ ID NO: 975 - RNA, 130 nt, synthetic construct
  source 1..130: mol_type = other RNA
caggtggaaaccatctccccgttttagagctagaaatagcaagttaaaataaggctagtccgttatcaacttgaaaaagtggcaccgagtcggtgcactactcgccgtctcctggggagatggtttccac

SEQ ID NO: 976 - RNA, 131 nt, synthetic construct
  source 1..131: mol_type = other RNA
caggtggaaaccatctccccgttttagagctagaaatagcaagttaaaataaggctagtccgttatcaacttgaaaaagtggcaccgagtcggtgcactactcgccgtctcctggggagatggtttccacc

SEQ ID NO: 977 - RNA, 127 nt, synthetic construct
  source 1..127: mol_type = other RNA
caggtggaaaccatctccccgttttagagctagaaatagcaagttaaaataaggctagtccgttatcaacttgaaaaagtggcaccgagtcggtgccactactcgccgtctcctggggagatggttt

SEQ ID NO: 978 - RNA, 128 nt, synthetic construct
  source 1..128: mol_type = other RNA
caggtggaaaccatctccccgttttagagctagaaatagcaagttaaaataaggctagtccgttatcaacttgaaaaagtggcaccgagtcggtgccactactcgccgtctcctggggagatggtttc

SEQ ID NO: 979 - RNA, 129 nt, synthetic construct
  source 1..129: mol_type = other RNA
caggtggaaaccatctccccgttttagagctagaaatagcaagttaaaataaggctagtccgttatcaacttgaaaaagtggcaccgagtcggtgccactactcgccgtctcctggggagatggtttcc

SEQ ID NO: 980 - RNA, 130 nt, synthetic construct
  source 1..130: mol_type = other RNA
caggtggaaaccatctccccgttttagagctagaaatagcaagttaaaataaggctagtccgttatcaacttgaaaaagtggcaccgagtcggtgccactactcgccgtctcctggggagatggtttcca

SEQ ID NO: 981 - RNA, 131 nt, synthetic construct
  source 1..131: mol_type = other RNA
caggtggaaaccatctccccgttttagagctagaaatagcaagttaaaataaggctagtccgttatcaacttgaaaaagtggcaccgagtcggtgccactactcgccgtctcctggggagatggtttccac

SEQ ID NO: 982 - RNA, 132 nt, synthetic construct
  source 1..132: mol_type = other RNA
caggtggaaaccatctccccgttttagagctagaaatagcaagttaaaataaggctagtccgttatcaacttgaaaaagtggcaccgagtcggtgccactactcgccgtctcctggggagatggtttccacc

SEQ ID NO: 983 - RNA, 128 nt, synthetic construct
  source 1..128: mol_type = other RNA
caggtggaaaccatctccccgttttagagctagaaatagcaagttaaaataaggctagtccgttatcaacttgaaaaagtggcaccgagtcggtgcccactactcgccgtctcctggggagatggttt

SEQ ID NO: 984 - RNA, 129 nt, synthetic construct
  source 1..129: mol_type = other RNA
caggtggaaaccatctccccgttttagagctagaaatagcaagttaaaataaggctagtccgttatcaacttgaaaaagtggcaccgagtcggtgcccactactcgccgtctcctggggagatggtttc

SEQ ID NO: 985 - RNA, 130 nt, synthetic construct
  source 1..130: mol_type = other RNA
caggtggaaaccatctccccgttttagagctagaaatagcaagttaaaataaggctagtccgttatcaacttgaaaaagtggcaccgagtcggtgcccactactcgccgtctcctggggagatggtttcc

SEQ ID NO: 986 - RNA, 131 nt, synthetic construct
  source 1..131: mol_type = other RNA
caggtggaaaccatctccccgttttagagctagaaatagcaagttaaaataaggctagtccgttatcaacttgaaaaagtggcaccgagtcggtgcccactactcgccgtctcctggggagatggtttcca

SEQ ID NO: 987 - RNA, 132 nt, synthetic construct
  source 1..132: mol_type = other RNA
caggtggaaaccatctccccgttttagagctagaaatagcaagttaaaataaggctagtccgttatcaacttgaaaaagtggcaccgagtcggtgcccactactcgccgtctcctggggagatggtttccac

SEQ ID NO: 988 - RNA, 133 nt, synthetic construct
  source 1..133: mol_type = other RNA
caggtggaaaccatctccccgttttagagctagaaatagcaagttaaaataaggctagtccgttatcaacttgaaaaagtggcaccgagtcggtgcccactactcgccgtctcctggggagatggtttccacc

SEQ ID NO: 989 - RNA, 129 nt, synthetic construct
  source 1..129: mol_type = other RNA
caggtggaaaccatctccccgttttagagctagaaatagcaagttaaaataaggctagtccgttatcaacttgaaaaagtggcaccgagtcggtgcgccactactcgccgtctcctggggagatggttt

SEQ ID NO: 990 - RNA, 130 nt, synthetic construct
  source 1..130: mol_type = other RNA
caggtggaaaccatctccccgttttagagctagaaatagcaagttaaaataaggctagtccgttatcaacttgaaaaagtggcaccgagtcggtgcgccactactcgccgtctcctggggagatggtttc

SEQ ID NO: 991 - RNA, 131 nt, synthetic construct
  source 1..131: mol_type = other RNA
caggtggaaaccatctccccgttttagagctagaaatagcaagttaaaataaggctagtccgttatcaacttgaaaaagtggcaccgagtcggtgcgccactactcgccgtctcctggggagatggtttcc

SEQ ID NO: 992 - RNA, 132 nt, synthetic construct
  source 1..132: mol_type = other RNA
caggtggaaaccatctccccgttttagagctagaaatagcaagttaaaataaggctagtccgttatcaacttgaaaaagtggcaccgagtcggtgcgccactactcgccgtctcctggggagatggtttcca

SEQ ID NO: 993 - RNA, 133 nt, synthetic construct
  source 1..133: mol_type = other RNA
caggtggaaaccatctccccgttttagagctagaaatagcaagttaaaataaggctagtccgttatcaacttgaaaaagtggcaccgagtcggtgcgccactactcgccgtctcctggggagatggtttccac

SEQ ID NO: 994 - RNA, 134 nt, synthetic construct
  source 1..134: mol_type = other RNA
caggtggaaaccatctccccgttttagagctagaaatagcaagttaaaataaggctagtccgttatcaacttgaaaaagtggcaccgagtcggtgcgccactactcgccgtctcctggggagatggtttccacc

SEQ ID NO: 995 - RNA, 130 nt, synthetic construct
  source 1..130: mol_type = other RNA
caggtggaaaccatctccccgttttagagctagaaatagcaagttaaaataaggctagtccgttatcaacttgaaaaagtggcaccgagtcggtgccgccactactcgccgtctcctggggagatggttt

SEQ ID NO: 996 - RNA, 131 nt, synthetic construct
  source 1..131: mol_type = other RNA
caggtggaaaccatctccccgttttagagctagaaatagcaagttaaaataaggctagtccgttatcaacttgaaaaagtggcaccgagtcggtgccgccactactcgccgtctcctggggagatggtttc

SEQ ID NO: 997 - RNA, 132 nt, synthetic construct
  source 1..132: mol_type = other RNA
caggtggaaaccatctccccgttttagagctagaaatagcaagttaaaataaggctagtccgttatcaacttgaaaaagtggcaccgagtcggtgccgccactactcgccgtctcctggggagatggtttcc

SEQ ID NO: 998 - RNA, 133 nt, synthetic construct
  source 1..133: mol_type = other RNA
caggtggaaaccatctccccgttttagagctagaaatagcaagttaaaataaggctagtccgttatcaacttgaaaaagtggcaccgagtcggtgccgccactactcgccgtctcctggggagatggtttcca

SEQ ID NO: 999 - RNA, 134 nt, synthetic construct
  source 1..134: mol_type = other RNA
caggtggaaaccatctccccgttttagagctagaaatagcaagttaaaataaggctagtccgttatcaacttgaaaaagtggcaccgagtcggtgccgccactactcgccgtctcctggggagatggtttccac

SEQ ID NO: 1000 - RNA, 135 nt, synthetic construct
  source 1..135: mol_type = other RNA
caggtggaaaccatctccccgttttagagctagaaatagcaagttaaaataaggctagtccgttatcaacttgaaaaagtggcaccgagtcggtgccgccactactcgccgtctcctggggagatggtttccacc

SEQ ID NO: 1001 - RNA, 131 nt, synthetic construct
  source 1..131: mol_type = other RNA
caggtggaaaccatctccccgttttagagctagaaatagcaagttaaaataaggctagtccgttatcaacttgaaaaagtggcaccgagtcggtgcgcgccactactcgccgtctcctggggagatggttt

SEQ ID NO: 1002 - RNA, 132 nt, synthetic construct
  source 1..132: mol_type = other RNA
caggtggaaaccatctccccgttttagagctagaaatagcaagttaaaataaggctagtccgttatcaacttgaaaaagtggcaccgagtcggtgcgcgccactactcgccgtctcctggggagatggtttc

SEQ ID NO: 1003 - RNA, 133 nt, synthetic construct
  source 1..133: mol_type = other RNA
caggtggaaaccatctccccgttttagagctagaaatagcaagttaaaataaggctagtccgttatcaacttgaaaaagtggcaccgagtcggtgcgcgccactactcgccgtctcctggggagatggtttcc

SEQ ID NO: 1004 - RNA, 134 nt, synthetic construct
  source 1..134: mol_type = other RNA
caggtggaaaccatctccccgttttagagctagaaatagcaagttaaaataaggctagtccgttatcaacttgaaaaagtggcaccgagtcggtgcgcgccactactcgccgtctcctggggagatggtttcca

SEQ ID NO: 1005 - RNA, 135 nt, synthetic construct
  source 1..135: mol_type = other RNA
caggtggaaaccatctccccgttttagagctagaaatagcaagttaaaataaggctagtccgttatcaacttgaaaaagtggcaccgagtcggtgcgcgccactactcgccgtctcctggggagatggtttccac

SEQ ID NO: 1006 - RNA, 136 nt, synthetic construct
  source 1..136: mol_type = other RNA
caggtggaaaccatctccccgttttagagctagaaatagcaagttaaaataaggctagtccgttatcaacttgaaaaagtggcaccgagtcggtgcgcgccactactcgccgtctcctggggagatggtttccacc

SEQ ID NO: 1007 - RNA, 132 nt, synthetic construct
  source 1..132: mol_type = other RNA
caggtggaaaccatctccccgttttagagctagaaatagcaagttaaaataaggctagtccgttatcaacttgaaaaagtggcaccgagtcggtgccgcgccactactcgccgtctcctggggagatggttt

SEQ ID NO: 1008 - RNA, 133 nt, synthetic construct
  source 1..133: mol_type = other RNA
caggtggaaaccatctccccgttttagagctagaaatagcaagttaaaataaggctagtccgttatcaacttgaaaaagtggcaccgagtcggtgccgcgccactactcgccgtctcctggggagatggtttc

SEQ ID NO: 1009 - RNA, 134 nt, synthetic construct
  source 1..134: mol_type = other RNA
caggtggaaaccatctccccgttttagagctagaaatagcaagttaaaataaggctagtccgttatcaacttgaaaaagtggcaccgagtcggtgccgcgccactactcgccgtctcctggggagatggtttcc

SEQ ID NO: 1010 - RNA, 135 nt, synthetic construct
  source 1..135: mol_type = other RNA
caggtggaaaccatctccccgttttagagctagaaatagcaagttaaaataaggctagtccgttatcaacttgaaaaagtggcaccgagtcggtgccgcgccactactcgccgtctcctggggagatggtttcca

SEQ ID NO: 1011 - RNA, 136 nt, synthetic construct
  source 1..136: mol_type = other RNA
caggtggaaaccatctccccgttttagagctagaaatagcaagttaaaataaggctagtccgttatcaacttgaaaaagtggcaccgagtcggtgccgcgccactactcgccgtctcctggggagatggtttccac

SEQ ID NO: 1012 - RNA, 137 nt, synthetic construct
  source 1..137: mol_type = other RNA
caggtggaaaccatctccccgttttagagctagaaatagcaagttaaaataaggctagtccgttatcaacttgaaaaagtggcaccgagtcggtgccgcgccactactcgccgtctcctggggagatggtttccacc

SEQ ID NO: 1013 - RNA, 133 nt, synthetic construct
  source 1..133: mol_type = other RNA
caggtggaaaccatctccccgttttagagctagaaatagcaagttaaaataaggctagtccgttatcaacttgaaaaagtggcaccgagtcggtgcgcgcgccactactcgccgtctcctggggagatggttt

SEQ ID NO: 1014 - RNA, 134 nt, synthetic construct
  source 1..134: mol_type = other RNA
caggtggaaaccatctccccgttttagagctagaaatagcaagttaaaataaggctagtccgttatcaacttgaaaaagtggcaccgagtcggtgcgcgcgccactactcgccgtctcctggggagatggtttc

SEQ ID NO: 1015 - RNA, 135 nt, synthetic construct
  source 1..135: mol_type = other RNA
caggtggaaaccatctccccgttttagagctagaaatagcaagttaaaataaggctagtccgttatcaacttgaaaaagtggcaccgagtcggtgcgcgcgccactactcgccgtctcctggggagatggtttcc

SEQ ID NO: 1016 - RNA, 136 nt, synthetic construct
  source 1..136: mol_type = other RNA
caggtggaaaccatctccccgttttagagctagaaatagcaagttaaaataaggctagtccgttatcaacttgaaaaagtggcaccgagtcggtgcgcgcgccactactcgccgtctcctggggagatggtttcca

SEQ ID NO: 1017 - RNA, 137 nt, synthetic construct
  source 1..137: mol_type = other RNA
caggtggaaaccatctccccgttttagagctagaaatagcaagttaaaataaggctagtccgttatcaacttgaaaaagtggcaccgagtcggtgcgcgcgccactactcgccgtctcctggggagatggtttccac

SEQ ID NO: 1018 - RNA, 138 nt, synthetic construct
  source 1..138: mol_type = other RNA
caggtggaaaccatctccccgttttagagctagaaatagcaagttaaaataaggctagtccgttatcaacttgaaaaagtggcaccgagtcggtgcgcgcgccactactcgccgtctcctggggagatggtttccacc

SEQ ID NO: 1019 - RNA, 134 nt, synthetic construct
  source 1..134: mol_type = other RNA
caggtggaaaccatctccccgttttagagctagaaatagcaagttaaaataaggctagtccgttatcaacttgaaaaagtggcaccgagtcggtgccgcgcgccactactcgccgtctcctggggagatggttt

SEQ ID NO: 1020 - RNA, 135 nt, synthetic construct
  source 1..135: mol_type = other RNA
caggtggaaaccatctccccgttttagagctagaaatagcaagttaaaataaggctagtccgttatcaacttgaaaaagtggcaccgagtcggtgccgcgcgccactactcgccgtctcctggggagatggtttc

SEQ ID NO: 1021 - RNA, 136 nt, synthetic construct
  source 1..136: mol_type = other RNA
caggtggaaaccatctccccgttttagagctagaaatagcaagttaaaataaggctagtccgttatcaacttgaaaaagtggcaccgagtcggtgccgcgcgccactactcgccgtctcctggggagatggtttcc

SEQ ID NO: 1022 - RNA, 137 nt, synthetic construct
  source 1..137: mol_type = other RNA
caggtggaaaccatctccccgttttagagctagaaatagcaagttaaaataaggctagtccgttatcaacttgaaaaagtggcaccgagtcggtgccgcgcgccactactcgccgtctcctggggagatggtttcca

SEQ ID NO: 1023 - RNA, 138 nt, synthetic construct
  source 1..138: mol_type = other RNA
caggtggaaaccatctccccgttttagagctagaaatagcaagttaaaataaggctagtccgttatcaacttgaaaaagtggcaccgagtcggtgccgcgcgccactactcgccgtctcctggggagatggtttccac

SEQ ID NO: 1024 - RNA, 139 nt, synthetic construct
  source 1..139: mol_type = other RNA
caggtggaaaccatctccccgttttagagctagaaatagcaagttaaaataaggctagtccgttatcaacttgaaaaagtggcaccgagtcggtgccgcgcgccactactcgccgtctcctggggagatggtttccacc

SEQ ID NO: 1025 - RNA, 135 nt, synthetic construct
  source 1..135: mol_type = other RNA
caggtggaaaccatctccccgttttagagctagaaatagcaagttaaaataaggctagtccgttatcaacttgaaaaagtggcaccgagtcggtgcccgcgcgccactactcgccgtctcctggggagatggttt

SEQ ID NO: 1026 - RNA, 136 nt, synthetic construct
  source 1..136: mol_type = other RNA
caggtggaaaccatctccccgttttagagctagaaatagcaagttaaaataaggctagtccgttatcaacttgaaaaagtggcaccgagtcggtgcccgcgcgccactactcgccgtctcctggggagatggtttc

SEQ ID NO: 1027 - RNA, 137 nt, synthetic construct
  source 1..137: mol_type = other RNA
caggtggaaaccatctccccgttttagagctagaaatagcaagttaaaataaggctagtccgttatcaacttgaaaaagtggcaccgagtcggtgcccgcgcgccactactcgccgtctcctggggagatggtttcc

SEQ ID NO: 1028 - RNA, 138 nt, synthetic construct
  source 1..138: mol_type = other RNA
caggtggaaaccatctccccgttttagagctagaaatagcaagttaaaataaggctagtccgttatcaacttgaaaaagtggcaccgagtcggtgcccgcgcgccactactcgccgtctcctggggagatggtttcca

SEQ ID NO: 1029 - RNA, 139 nt, synthetic construct
  source 1..139: mol_type = other RNA
caggtggaaaccatctccccgttttagagctagaaatagcaagttaaaataaggctagtccgttatcaacttgaaaaagtggcaccgagtcggtgcccgcgcgccactactcgccgtctcctggggagatggtttccac

SEQ ID NO: 1030 - RNA, 140 nt, synthetic construct
  source 1..140: mol_type = other RNA
caggtggaaaccatctccccgttttagagctagaaatagcaagttaaaataaggctagtccgttatcaacttgaaaaagtggcaccgagtcggtgcccgcgcgccactactcgccgtctcctggggagatggtttccacc

SEQ ID NO: 1031 - RNA, 136 nt, synthetic construct
  source 1..136: mol_type = other RNA
caggtggaaaccatctccccgttttagagctagaaatagcaagttaaaataaggctagtccgttatcaacttgaaaaagtggcaccgagtcggtgcgccgcgcgccactactcgccgtctcctggggagatggttt

SEQ ID NO: 1032 - RNA, 137 nt, synthetic construct
  source 1..137: mol_type = other RNA
caggtggaaaccatctccccgttttagagctagaaatagcaagttaaaataaggctagtccgttatcaacttgaaaaagtggcaccgagtcggtgcgccgcgcgccactactcgccgtctcctggggagatggtttc

SEQ ID NO: 1033 - RNA, 138 nt, synthetic construct
  source 1..138: mol_type = other RNA
caggtggaaaccatctccccgttttagagctagaaatagcaagttaaaataaggctagtccgttatcaacttgaaaaagtggcaccgagtcggtgcgccgcgcgccactactcgccgtctcctggggagatggtttcc

SEQ ID NO: 1034 - RNA, 139 nt, synthetic construct
  source 1..139: mol_type = other RNA
caggtggaaaccatctccccgttttagagctagaaatagcaagttaaaataaggctagtccgttatcaacttgaaaaagtggcaccgagtcggtgcgccgcgcgccactactcgccgtctcctggggagatggtttcca

SEQ ID NO: 1035 - RNA, 140 nt, synthetic construct
  source 1..140: mol_type = other RNA
caggtggaaaccatctccccgttttagagctagaaatagcaagttaaaataaggctagtccgttatcaacttgaaaaagtggcaccgagtcggtgcgccgcgcgccactactcgccgtctcctggggagatggtttccac

SEQ ID NO: 1036 - RNA, 141 nt, synthetic construct
  source 1..141: mol_type = other RNA
caggtggaaaccatctccccgttttagagctagaaatagcaagttaaaataaggctagtccgttatcaacttgaaaaagtggcaccgagtcggtgcgccgcgcgccactactcgccgtctcctggggagatggtttccacc

SEQ ID NO: 1037 - DNA, 23 bp, Homo sapiens
  source 1..23: mol_type = genomic DNA
gcgccctgaggagacagagacgg

SEQ ID NO: 1038 - DNA, 23 bp, Homo sapiens
  source 1..23: mol_type = genomic DNA
cgccctgaggagacagagacggg

SEQ ID NO: 1039 - DNA, 23 bp, Homo sapiens
  source 1..23: mol_type = genomic DNA
gcatgctgagccgatgcgcgcgg

SEQ ID NO: 1040 - DNA, 23 bp, Homo sapiens
  source 1..23: mol_type = genomic DNA
tgctgagccgatgcgcgcggcgg

SEQ ID NO: 1041 - DNA, 23 bp, Homo sapiens
  source 1..23: mol_type = genomic DNA
gccgatgcgcgcggcggcagagg

SEQ ID NO: 1042 - DNA, 23 bp, Homo sapiens
  source 1..23: mol_type = genomic DNA
cgccactactcaccgtctcctgg

SEQ ID NO: 1043 - DNA, 23 bp, Homo sapiens
  source 1..23: mol_type = genomic DNA
gccactactcaccgtctcctggg

SEQ ID NO: 1044 - DNA, 23 bp, Homo sapiens
  source 1..23: mol_type = genomic DNA
ccactactcaccgtctcctgggg

SEQ ID NO: 1045 - DNA, 23 bp, Homo sapiens
  source 1..23: mol_type = genomic DNA
ctcaccgtctcctggggagatgg

SEQ ID NO: 1046 - DNA, 23 bp, Homo sapiens
  source 1..23: mol_type = genomic DNA
ggtttccacctgcactcccatgg

SEQ ID NO: 1047 - DNA, 23 bp, Homo sapiens
  source 1..23: mol_type = genomic DNA
ttccacctgcactcccatggcgg

SEQ ID NO: 1048 - DNA, 23 bp, Homo sapiens
  source 1..23: mol_type = genomic DNA
cacctgcactcccatggcggcgg

SEQ ID NO: 1049 - DNA, 23 bp, Homo sapiens
  source 1..23: mol_type = genomic DNA
ctgcactcccatggcggcggcgg

SEQ ID NO: 1050 - DNA, 23 bp, Homo sapiens
  source 1..23: mol_type = genomic DNA
tggcggcggcggacgctgagcgg

SEQ ID NO: 1051 - DNA, 23 bp, Homo sapiens
  source 1..23: mol_type = genomic DNA
ggcggcggcggacgctgagcggg

SEQ ID NO: 1052 - DNA, 23 bp, Homo sapiens
  source 1..23: mol_type = genomic DNA
ggcggcggacgctgagcgggcgg

SEQ ID NO: 1053 - DNA, 23 bp, Homo sapiens
  source 1..23: mol_type = genomic DNA
gcggcggacgctgagcgggcggg

SEQ ID NO: 1054 - DNA, 23 bp, Homo sapiens
  source 1..23: mol_type = genomic DNA
gcggacgctgagcgggcgggcgg

SEQ ID NO: 1055 - DNA, 23 bp, Homo sapiens
  source 1..23: mol_type = genomic DNA
tgagcgggcgggcggcgcgacgg

SEQ ID NO: 1056 - DNA, 23 bp, Homo sapiens
  source 1..23: mol_type = genomic DNA
gagcgggcgggcggcgcgacggg

SEQ ID NO: 1057 - DNA, 23 bp, Homo sapiens
  source 1..23: mol_type = genomic DNA
cgggcgggcggcgcgacgggcgg

SEQ ID NO: 1058 - DNA, 23 bp, Homo sapiens
  source 1..23: mol_type = genomic DNA
gggcggcgcgacgggcggcgtgg

SEQ ID NO: 1059 - DNA, 23 bp, Homo sapiens
  source 1..23: mol_type = genomic DNA
cgccactactcgccgtctcctgg

SEQ ID NO: 1060 - DNA, 23 bp, Homo sapiens
  source 1..23: mol_type = genomic DNA
gccactactcgccgtctcctggg

SEQ ID NO: 1061 - DNA, 23 bp, Homo sapiens
  source 1..23: mol_type = genomic DNA
ccactactcgccgtctcctgggg

SEQ ID NO: 1062 - DNA, 23 bp, Homo sapiens
  source 1..23: mol_type = genomic DNA
ctcgccgtctcctggggagatgg

SEQ ID NO: 1063 - RNA, 20 nt, synthetic construct
  source 1..20: mol_type = other RNA
gcgccctgaggagacagaga

SEQ ID NO: 1064 - RNA, 20 nt, synthetic construct
  source 1..20: mol_type = other RNA
cgccctgaggagacagagac

SEQ ID NO: 1065 - RNA, 20 nt, synthetic construct
  source 1..20: mol_type = other RNA
gcatgctgagccgatgcgcg

SEQ ID NO: 1066 - RNA, 20 nt, synthetic construct
  source 1..20: mol_type = other RNA
tgctgagccgatgcgcgcgg

SEQ ID NO: 1067 - RNA, 20 nt, synthetic construct
  source 1..20: mol_type = other RNA
gccgatgcgcgcggcggcag

SEQ ID NO: 1068 - RNA, 20 nt, synthetic construct
  source 1..20: mol_type = other RNA
cgccactactcaccgtctcc

SEQ ID NO: 1069 - RNA, 20 nt, synthetic construct
  source 1..20: mol_type = other RNA
gccactactcaccgtctcct

SEQ ID NO: 1070 - RNA, 20 nt, synthetic construct
  source 1..20: mol_type = other RNA
ccactactcaccgtctcctg

SEQ ID NO: 1071 - RNA, 20 nt, synthetic construct
  source 1..20: mol_type = other RNA
ctcaccgtctcctggggaga

SEQ ID NO: 1072 - RNA, 20 nt, synthetic construct
  source 1..20: mol_type = other RNA
ggtttccacctgcactccca

SEQ ID NO: 1073 - RNA, 20 nt, synthetic construct
  source 1..20: mol_type = other RNA
ttccacctgcactcccatgg

SEQ ID NO: 1074 - RNA, 20 nt, synthetic construct
  source 1..20: mol_type = other RNA
cacctgcactcccatggcgg

SEQ ID NO: 1075 - RNA, 20 nt, synthetic construct
  source 1..20: mol_type = other RNA
ctgcactcccatggcggcgg

SEQ ID NO: 1076 - RNA, 20 nt, synthetic construct
  source 1..20: mol_type = other RNA
tggcggcggcggacgctgag

SEQ ID NO: 1077 - RNA, 20 nt, synthetic construct
  source 1..20: mol_type = other RNA
ggcggcggcggacgctgagc

SEQ ID NO: 1078 - RNA, 20 nt, synthetic construct
  source 1..20: mol_type = other RNA
ggcggcggacgctgagcggg

SEQ ID NO: 1079 - RNA, 20 nt, synthetic construct
  source 1..20: mol_type = other RNA
gcggcggacgctgagcgggc

SEQ ID NO: 1080 - RNA, 20 nt, synthetic construct
  source 1..20: mol_type = other RNA
gcggacgctgagcgggcggg

SEQ ID NO: 1081 - RNA, 20 nt, synthetic construct
  source 1..20: mol_type = other RNA
tgagcgggcgggcggcgcga

SEQ ID NO: 1082 - RNA, 20 nt, synthetic construct
  source 1..20: mol_type = other RNA
gagcgggcgggcggcgcgac

SEQ ID NO: 1083 - RNA, 20 nt, synthetic construct
  source 1..20: mol_type = other RNA
cgggcgggcggcgcgacggg

SEQ ID NO: 1084 - RNA, 20 nt, synthetic construct
  source 1..20: mol_type = other RNA
gggcggcgcgacgggcggcg

SEQ ID NO: 1085 - RNA, 20 nt, synthetic construct
  source 1..20: mol_type = other RNA
cgccactactcgccgtctcc

SEQ ID NO: 1086 - RNA, 20 nt, synthetic construct
  source 1..20: mol_type = other RNA
gccactactcgccgtctcct

SEQ ID NO: 1087 - RNA, 20 nt, synthetic construct
  source 1..20: mol_type = other RNA
ccactactcgccgtctcctg

SEQ ID NO: 1088 - RNA, 20 nt, synthetic construct
  source 1..20: mol_type = other RNA
ctcgccgtctcctggggaga

SEQ ID NO: 1089 - RNA, 100 nt, synthetic construct; identical to SEQ ID NO: 508
  source 1..100: mol_type = other RNA

SEQ ID NO: 1090 - RNA, 100 nt, synthetic construct; identical to SEQ ID NO: 509
  source 1..100: mol_type = other RNA

SEQ ID NO: 1091 - RNA, 100 nt, synthetic construct
  source 1..100: mol_type = other RNA
gcatgctgagccgatgcgcggttttagagctagaaatagcaagttaaaataaggctagtccgttatcaacttgaaaaagtggcaccgagtcggtgctttt

SEQ ID NO: 1092 - RNA, 100 nt, synthetic construct
  source 1..100: mol_type = other RNA
tgctgagccgatgcgcgcgggttttagagctagaaatagcaagttaaaataaggctagtccgttatcaacttgaaaaagtggcaccgagtcggtgctttt

SEQ ID NO: 1093 - RNA, 100 nt, synthetic construct
  source 1..100: mol_type = other RNA
gccgatgcgcgcggcggcaggttttagagctagaaatagcaagttaaaataaggctagtccgttatcaacttgaaaaagtggcaccgagtcggtgctttt

SEQ ID NO: 1094 - RNA, 100 nt, synthetic construct
  source 1..100: mol_type = other RNA
cgccactactcaccgtctccgttttagagctagaaatagcaagttaaaataaggctagtccgttatcaacttgaaaaagtggcaccgagtcggtgctttt

SEQ ID NO: 1095 - RNA, 100 nt, synthetic construct
  source 1..100: mol_type = other RNA
gccactactcaccgtctcctgttttagagctagaaatagcaagttaaaataaggctagtccgttatcaacttgaaaaagtggcaccgagtcggtgctttt

SEQ ID NO: 1096 - RNA, 100 nt, synthetic construct
  source 1..100: mol_type = other RNA
ccactactcaccgtctcctggttttagagctagaaatagcaagttaaaataaggctagtccgttatcaacttgaaaaagtggcaccgagtcggtgctttt

SEQ ID NO: 1097 - RNA, 100 nt, synthetic construct; identical to SEQ ID NO: 501
  source 1..100: mol_type = other RNA

SEQ ID NO: 1098 - RNA, 100 nt, synthetic construct
  source 1..100: mol_type = other RNA
ggtttccacctgcactcccagttttagagctagaaatagcaagttaaaataaggctagtccgttatcaacttgaaaaagtggcaccgagtcggtgctttt

SEQ ID NO: 1099 - RNA, 100 nt, synthetic construct
  source 1..100: mol_type = other RNA
ttccacctgcactcccatgggttttagagctagaaatagcaagttaaaataaggctagtccgttatcaacttgaaaaagtggcaccgagtcggtgctttt

SEQ ID NO: 1100 - RNA, 100 nt, synthetic construct
  source 1..100: mol_type = other RNA
cacctgcactcccatggcgggttttagagctagaaatagcaagttaaaataaggctagtccgttatcaacttgaaaaagtggcaccgagtcggtgctttt

SEQ ID NO: 1101 - RNA, 100 nt, synthetic construct
  source 1..100: mol_type = other RNA
ctgcactcccatggcggcgggttttagagctagaaatagcaagttaaaataaggctagtccgttatcaacttgaaaaagtggcaccgagtcggtgctttt

SEQ ID NO: 1102 - RNA, 100 nt, synthetic construct
  source 1..100: mol_type = other RNA
tggcggcggcggacgctgaggttttagagctagaaatagcaagttaaaataaggctagtccgttatcaacttgaaaaagtggcaccgagtcggtgctttt

SEQ ID NO: 1103 - RNA, 100 nt, synthetic construct
  source 1..100: mol_type = other RNA
ggcggcggcggacgctgagcgttttagagctagaaatagcaagttaaaataaggctagtccgttatcaacttgaaaaagtggcaccgagtcggtgctttt

SEQ ID NO: 1104 - RNA, 100 nt, synthetic construct
  source 1..100: mol_type = other RNA
ggcggcggacgctgagcggggttttagagctagaaatagcaagttaaaataaggctagtccgttatcaacttgaaaaagtggcaccgagtcggtgctttt

SEQ ID NO: 1105 - RNA, 100 nt, synthetic construct
  source 1..100: mol_type = other RNA
gcggcggacgctgagcgggcgttttagagctagaaatagcaagttaaaataaggctagtccgttatcaacttgaaaaagtggcaccgagtcggtgctttt

SEQ ID NO: 1106 - RNA, 100 nt, synthetic construct
  source 1..100: mol_type = other RNA
gcggacgctgagcgggcggggttttagagctagaaatagcaagttaaaataaggctagtccgttatcaacttgaaaaagtggcaccgagtcggtgctttt

SEQ ID NO: 1107 - RNA, 100 nt, synthetic construct
  source 1..100: mol_type = other RNA
tgagcgggcgggcggcgcgagttttagagctagaaatagcaagttaaaataaggctagtccgttatcaacttgaaaaagtggcaccgagtcggtgctttt

SEQ ID NO: 1108 - RNA, 100 nt, synthetic construct
  source 1..100: mol_type = other RNA
gagcgggcgggcggcgcgacgttttagagctagaaatagcaagttaaaataaggctagtccgttatcaacttgaaaaagtggcaccgagtcggtgctttt

SEQ ID NO: 1109 - RNA, 100 nt, synthetic construct
  source 1..100: mol_type = other RNA
cgggcgggcggcgcgacggggttttagagctagaaatagcaagttaaaataaggctagtccgttatcaacttgaaaaagtggcaccgagtcggtgctttt

SEQ ID NO: 1110 - RNA, 100 nt, synthetic construct
  source 1..100: mol_type = other RNA
gggcggcgcgacgggcggcggttttagagctagaaatagcaagttaaaataaggctagtccgttatcaacttgaaaaagtggcaccgagtcggtgctttt

SEQ ID NO: 1111 - RNA, 100 nt, synthetic construct
  source 1..100: mol_type = other RNA
cgccactactcgccgtctccgttttagagctagaaatagcaagttaaaataaggctagtccgttatcaacttgaaaaagtggcaccgagtcggtgctttt

SEQ ID NO: 1112 - RNA, 100 nt, synthetic construct
  source 1..100: mol_type = other RNA
gccactactcgccgtctcctgttttagagctagaaatagcaagttaaaataaggctagtccgttatcaacttgaaaaagtggcaccgagtcggtgctttt

SEQ ID NO: 1113 - RNA, 100 nt, synthetic construct
  source 1..100: mol_type = other RNA
ccactactcgccgtctcctggttttagagctagaaatagcaagttaaaataaggctagtccgttatcaacttgaaaaagtggcaccgagtcggtgctttt

SEQ ID NO: 1114 - RNA, 100 nt, synthetic construct
  source 1..100: mol_type = other RNA
ctcgccgtctcctggggagagttttagagctagaaatagcaagttaaaataaggctagtccgttatcaacttgaaaaagtggcaccgagtcggtgctttt

SEQ ID NO: 1115 - protein, 2117 aa, synthetic construct
MKRTADGSEFESPKKKRKVDKKYSIGLDIGTNSVGWAVITDEYKVPSKKFKVLGNTDRHSIKKNLIGALLFDSGETAEATRLKRTARRRYTRRKNRICYLQEIFSNEMAKVDDSFFHRLEESFLVEEDKKHERHPIFGNIVDEVAYHEKYPTIYHLRKKLVDSTDKADLRLIYLALAHMIKFRGHFLIEGDLNPDNSDVDKLFIQLVQTYNQLFEENPINASGVDAKAILSARLSKSRRLENLIAQLPGEKKNGLFGNLIALSLGLTPNFKSNFDLAEDAKLQLSKDTYDDDLDNLLAQIGDQYADLFLAAKNLSDAILLSDILRVNTEITKAPLSASMIKRYDEHHQDLTLLKALVRQQLPEKYKEIFFDQSKNGYAGYIDGGASQEEFYKFIKPILEKMDGTEELLVKLNREDLLRKQRTFDNGSIPHQIHLGELHAILRRQEDFYPFLKDNREKIEKILTFRIPYYVGPLARGNSRFAWMTRKSEETITPWNFEEVVDKGASAQSFIERMTNFDKNLPNEKVLPKHSLLYEYFTVYNELTKVKYVTEGMRKPAFLSGEQKKAIVDLLFKTNRKVTVKQLKEDYFKKIECFDSVEISGVEDRFNASLGTYHDLLKIIKDKDFLDNEENEDILEDIVLTLTLFEDREMIEERLKTYAHLFDDKVMKQLKRRRYTGWGRLSRKLINGIRDKQSGKTILDFLKSDGFANRNFMQLIHDDSLTFKEDIQKAQVSGQGDSLHEHIANLAGSPAIKKGILQTVKVVDELVKVMGRHKPENIVIEMARENQTTQKGQKNSRERMKRIEEGIKELGSQILKEHPVENTQLQNEKLYLYYLQNGRDMYVDQELDINRLSDYDVDAIVPQSFLKDDSIDNKVLTRSDKNRGKSDNVPSEEVVKKMKNYWRQLLNAKLITQRKFDNLTKAERGGLSELDKAGFIKRQLVETRQITKHVAQILDSRMNTKYDENDKLIREVKVITLKSKLVSDFRKDFQFYKVREINNYHHAHDAYLNAVVGTALIKKYPKLESEFVYGDYKVYDVRKMIAKSEQEIGKATAKYFFYSNIMNFFKTEITLANGEIRKRPLIETNGETGEIVWDKGRDFATVRKVLSMPQVNIVKKTEVQTGGFSKESILPKRNSDKLIARKKDWDPKKYGGFDSPTVAYSVLVVAKVEKGKSKKLKSVKELLGITIMERSSFEKNPIDFLEAKGYKEVKKDLIIKLPKYSLFELENGRKRMLASAGELQKGNELALPSKYVNFLYLASHYEKLKGSPEDNEQKQLFVEQHKHYLDEIIEQISEFSKRVILADANLDKVLSAYNKHRDKPIREQAENIIHLFTLTNLGAPAAFKYFDTTIDRKRYTSTKEVLDATLIHQSITGLYETRIDLSQLGGDSGGSSGGSSGSETPGTSESATPESSGGSSGGSSTLNIEDEYRLHETSKEPDVSLGSTWLSDFPQAWAETGGMGLAVRQAPLIIPLKATSTPVSIKQYPMSQEARLGIKPHIQRLLDQGILVPCQSPWNTPLLPVKKPGTNDYRPVQDLREVNKRVEDIHPTVPNPYNLLSGLPPSHQWYTVLDLKDAFFCLRLHPTSQPLFAFEWRDPEMGISGQLTWTRLPQGFKNSPTLFNEALHRDLADFRIQHPDLILLQYVDDLLLAATSELDCQQGTRALLQTLGNLGYRASAKKAQICQKQVKYLGYLLKEGQRWLTEARKETVMGQPTPKTPRQLREFLGKAGFCRLFIPGFAEMAAPLYPLTKPGTLFNWGPDQQKAYQEIKQALLTAPALGLPDLTKPFELFVDEKQGYAKGVLTQKLGPWRRPVAYLSKKLDPVAAGWPPCLRMVAAIAVLTKDAGKLTMGQPLVILAPHAVEALVKQPPDRWLSNARMTHYQALLLDTDRVQFGPVVALNPATLLPLPEEGLQHNCLDILAEAHGTRPDLTDQPLPDADHTWYTDGSSLLQEGQRKAGAAVTTETEVIWAKALPAGTSAQRAELIALTQALKMAEGKKLNVYTDSRYAFATAHIHGEIYRRRGWLTSEGKEIKNKDEILALLKALFLPKRLSIIHCPGHQKGHSAEARGNRMADQAARKAAITETPDTSTLLIENSSPSGGSKRTADGSEFEPKKKRKV

SEQ ID NO: 1116 - DNA, 6354 bp, synthetic construct
  source 1..6354: mol_type = other DNA
atgaaacggacagccgacggaagcgagttcgagtcaccaaagaagaagcggaaagtcgacaagaagtacagcatcggcctggacatcggcaccaactctgtgggctgggccgtgatcaccgacgagtacaaggtgcccagcaagaaattcaaggtgctgggcaacaccgaccggcacagcatcaagaagaacctgatcggagccctgctgttcgacagcggcgaaacagccgaggccacccggctgaagagaaccgccagaagaagatacaccagacggaagaaccggatctgctatctgcaagagatcttcagcaacgagatggccaaggtggacgacagcttcttccacagactggaagagtccttcctggtggaagaggataagaagcacgagcggcaccccatcttcggcaacatcgtggacgaggtggcctaccacgagaagtaccccaccatctaccacctgagaaagaaactggtggacagcaccgacaaggccgacctgcggctgatctatctggccctggcccacatgatcaagttccggggccacttcctgatcgagggcgacctgaaccccgacaacagcgacgtggacaagctgttcatccagctggtgcagacctacaaccagctgttcgaggaaaaccccatcaacgccagcggcgtggacgccaaggccatcctgtctgccagactgagcaagagcagacggctggaaaatctgatcgcccagctgcccggcgagaagaagaatggcctgttcggaaacctgattgccctgagcctgggcctgacccccaacttcaagagcaacttcgacctggccgaggatgccaaactgcagctgagcaaggacacctacgacgacgacctggacaacctgctggcccagatcggcgaccagtacgccgacctgtttctggccgccaagaacctgtccgacgccatcctgctgagcgacatcctgagagtgaacaccgagatcaccaaggcccccctgagcgcctctatgatcaagagatacgacgagcaccaccaggacctgaccctgctgaaagctctcgtgcggcagcagctgcctgagaagtacaaagagattttcttcgaccagagcaagaacggctacgccggctacattgacggcggagccagccaggaagagttctacaagttcatcaagcccatcctggaaaagatggacggcaccgaggaactgctcgtgaagctgaacagagaggacctgctgcggaagcagcggaccttcgacaacggcagcatcccccaccagatccacctgggagagctgcacgccattctgcggcggcaggaagatttttacccattcctgaaggacaaccgggaaaagatcgagaagatcctgaccttccgcatcccctactacgtgggccctctggccaggggaaacagcagattcgcctggatgaccagaaagagcgaggaaaccatcaccccctggaacttcgaggaagtggtggacaagggcgcttccgcccagagcttcatcgagcggatgaccaacttcgataagaacctgcccaacgagaaggtgctgcccaagcacagcctgctgtacgagtacttcaccgtgtataacgagctgaccaaagtgaaatacgtgaccgagggaatgagaaagcccgccttcctgagcggcgagcagaaaaaggccatcgtggacctgctgttcaagaccaaccggaaagtgaccgtgaagcagctgaaagaggactacttcaagaaaatcgagtgcttcgactccgtggaaatctccggcgtggaagatcggttcaacgcctccctgggcacataccacgatctgctgaaaattatcaaggacaaggacttcctggacaatgaggaaaacgaggacattctggaagatatcgtgctgaccctgacactgtttgaggacagagagatgatcgaggaacggctgaaaacctatgcccacctgttcgacgacaaagtgatgaagcagctgaagcggcggagatacaccggctggggcaggctgagccggaagctgatcaacggcatccgggacaagcagtccggcaagacaatcctggatttcctgaagtccgacggcttcgccaacagaaacttcatgcagctgatccacgacgacagcctgacctttaaagaggacatccagaaagcccaggtgtccggccagggcgatagcctgcacgagcacattgccaatctggccggcagccccgccattaagaagggcatcctgcagacagtgaaggtggtggacgagctcgtgaaagtgatgggccggcacaagcccgagaacatcgtgatcgaaatggccagagagaaccagaccacccagaagggacagaagaacagccgcgagagaatgaagcggatcgaagagggcatcaaagagctgggcagccagatcctgaaagaacaccccgtggaaaacacccagctgcagaacgagaagctgtacctgtactacctgcagaatgggcgggatatgtacgtggaccaggaactggacatcaaccggctgtccgactacgatgtggacgctatcgtgcctcagagctttctgaaggacgactccatcgacaacaaggtgctgaccagaagcgacaagaaccggggcaagagcgacaacgtgccctccgaagaggtcgtgaagaagatgaagaactactggcggcagctgctgaacgccaagctgattacccagagaaagttcgacaatctgaccaaggccgagagaggcggcctgagcgaactggataaggccggcttcatcaagagacagctggtggaaacccggcagatcacaaagcacgtggcacagatcctggactcccggatgaacactaagtacgacgagaatgacaagctgatccgggaagtgaaagtgatcaccctgaagtccaagctggtgtccgatttccggaaggatttccagttttacaaagtgcgcgagatcaacaactaccaccacgcccacgacgcctacctgaacgccgtcgtgggaaccgccctgatcaaaaagtaccctaagctggaaagcgagttcgtgtacggcgactacaaggtgtacgacgtgcggaagatgatcgccaagagcgagcaggaaatcggcaaggctaccgccaagtacttcttctacagcaacatcatgaactttttcaagaccgagattaccctggccaacggcgagatccggaagcggcctctgatcgagacaaacggcgaaaccggggagatcgtgtgggataagggccgggattttgccaccgtgcggaaagtgctgagcatgccccaagtgaatatcgtgaaaaagaccgaggtgcagacaggcggcttcagcaaagagtctatcctgcccaagaggaacagcgataagctgatcgccagaaagaaggactgggaccctaagaagtacggcggcttcgacagccccaccgtggcctattctgtgctggtggtggccaaagtggaaaagggcaagtccaagaaactgaagagtgtgaaagagctgctggggatcaccatcatggaaagaagcagcttcgagaagaatcccatcgactttctggaagccaagggctacaaagaagtgaaaaaggacctgatcatcaagctgcctaagtactccctgttcgagctggaaaacggccggaagagaatgctggcctctgccggcgaactgcagaagggaaacgaactggccctgccctccaaatatgtgaacttcctgtacctggccagccactatgagaagctgaagggctcccccgaggataatgagcagaaacagctgtttgtggaacagcacaagcactacctggacgagatcatcgagcagatcagcgagttctccaagagagtgatcctggccgacgctaatctggacaaagtgctgtccgcctacaacaagcaccgggataagcccatcagagagcaggccgagaatatcatccacctgtttaccctgaccaatctgggagcccctgccgccttcaagtactttgacaccaccatcgaccggaagaggtacaccagcaccaaagaggtgctggacgccaccctgatccaccagagcatcaccggcctgtacgagacacggatcgacctgtctcagctgggaggtgactctggaggatctagcggaggatcctctggcagcgagacaccaggaacaagcgagtcagcaacaccagagagcagtggcggcagcagcggcggcagcagcaccctaaatatagaagatgagtatcggctacatgagacctcaaaagagccagatgtttctctagggtccacatggctgtctgattttcctcaggcctgggcggaaaccgggggcatgggactggcagttcgccaagctcctctgatcatacctctgaaagcaacctctacccccgtgtccataaaacaataccccatgtcacaagaagccagactggggatcaagccccacatacagagactgttggaccagggaatactggtaccctgccagtccccctggaacacgcccctgctacccgttaagaaaccagggactaatgattataggcctgtccaggatctgagagaagtcaacaagcgggtggaagatatccaccccaccgtgcccaacccttacaacctcttgagcgggctcccaccgtcccaccagtggtacactgtgcttgatttaaaggatgcctttttctgcctgagactccaccccaccagtcagcctctcttcgcctttgagtggagagatccagagatgggaatctcaggacaattgacctggaccagactcccacagggtttcaaaaacagtcccaccctgtttaatgaggcactgcacagagacctagcagacttccggatccagcacccagacttgatcctgctacagtacgtggatgacttactgctggccgccacttctgagctagactgccaacaaggtactcgggccctgttacaaaccctagggaacctcgggtatcgggcctcggccaagaaagcccaaatttgccagaaacaggtcaagtatctggggtatcttctaaaagagggtcagagatggctgactgaggccagaaaagagactgtgatggggcagcctactcctaagacccctcgacaactaagggagttcctagggaaggcaggcttctgtcgcctcttcatccctgggtttgcagaaatggcagcccccctgtaccctctcaccaaaccggggactctgtttaattggggcccagaccaacaaaaggcctatcaagaaatcaagcaagctcttctaactgccccagccctggggttgccagatttgactaagccctttgaactctttgtcgacgagaagcagggctacgccaaaggtgtcctaacgcaaaaactgggaccttggcgtcggccggtggcctacctgtccaaaaagctagacccagtagcagctgggtggcccccttgcctacggatggtagcagccattgccgtactgacaaaggatgcaggcaagctaaccatgggacagccactagtcattctggccccccatgcagtagaggcactagtcaaacaaccccccgaccgctggctttccaacgcccggatgactcactatcaggccttgcttttggacacggaccgggtccagttcggaccggtggtagccctgaacccggctacgctgctcccactgcctgaggaagggctgcaacacaactgccttgatatcctggccgaagcccacggaacccgacccgacctaacggaccagccgctcccagacgccgaccacacctggtacacggatggaagcagtctcttacaagagggacagcgtaaggcgggagctgcggtgaccaccgagaccgaggtaatctgggctaaagccctgccagccgggacatccgctcagcgggctgaactgatagcactcacccaggccctaaagatggcagaaggtaagaagctaaatgtttatactgatagccgttatgcttttgctactgcccatatccatggagaaatatacagaaggcgtgggtggctcacatcagaaggcaaagagatcaaaaataaagacgagatcttggccctactaaaagccctctttctgcccaaaagacttagcataatccattgtccaggacatcaaaagggacacagcgccgaggctagaggcaaccggatggctgaccaagcggcccgaaaggcagccatcacagagactccagacacctctaccctcctcatagaaaattcatcaccctctggcggctcaaaaagaaccgccgacggcagcgaattcgagcccaagaagaagaggaaagtctaa

SEQ ID NO: 1117 - protein, 1938 aa, synthetic construct
MKRTADGSEFESPKKKRKVDKKYSIGLDIGTNSVGWAVITDEYKVPSKKFKVLGNTDRHSIKKNLIGALLFDSGETAEATRLKRTARRRYTRRKNRICYLQEIFSNEMAKVDDSFFHRLEESFLVEEDKKHERHPIFGNIVDEVAYHEKYPTIYHLRKKLVDSTDKADLRLIYLALAHMIKFRGHFLIEGDLNPDNSDVDKLFIQLVQTYNQLFEENPINASGVDAKAILSARLSKSRRLENLIAQLPGEKKNGLFGNLIALSLGLTPNFKSNFDLAEDAKLQLSKDTYDDDLDNLLAQIGDQYADLFLAAKNLSDAILLSDILRVNTEITKAPLSASMIKRYDEHHQDLTLLKALVRQQLPEKYKEIFFDQSKNGYAGYIDGGASQEEFYKFIKPILEKMDGTEELLVKLNREDLLRKQRTFDNGSIPHQIHLGELHAILRRQEDFYPFLKDNREKIEKILTFRIPYYVGPLARGNSRFAWMTRKSEETITPWNFEEVVDKGASAQSFIERMTNFDKNLPNEKVLPKHSLLYEYFTVYNELTKVKYVTEGMRKPAFLSGEQKKAIVDLLFKTNRKVTVKQLKEDYFKKIECFDSVEISGVEDRFNASLGTYHDLLKIIKDKDFLDNEENEDILEDIVLTLTLFEDREMIEERLKTYAHLFDDKVMKQLKRRRYTGWGRLSRKLINGIRDKQSGKTILDFLKSDGFANRNFMQLIHDDSLTFKEDIQKAQVSGQGDSLHEHIANLAGSPAIKKGILQTVKVVDELVKVMGRHKPENIVIEMARENQTTQKGQKNSRERMKRIEEGIKELGSQILKEHPVENTQLQNEKLYLYYLQNGRDMYVDQELDINRLSDYDVDAIVPQSFLKDDSIDNKVLTRSDKNRGKSDNVPSEEVVKKMKNYWRQLLNAKLITQRKFDNLTKAERGGLSELDKAGFIKRQLVETRQITKHVAQILDSRMNTKYDENDKLIREVKVITLKSKLVSDFRKDFQFYKVREINNYHHAHDAYLNAVVGTALIKKYPKLESEFVYGDYKVYDVRKMIAKSEQEIGKATAKYFFYSNIMNFFKTEITLANGEIRKRPLIETNGETGEIVWDKGRDFATVRKVLSMPQVNIVKKTEVQTGGFSKESILPKRNSDKLIARKKDWDPKKYGGFDSPTVAYSVLVVAKVEKGKSKKLKSVKELLGITIMERSSFEKNPIDFLEAKGYKEVKKDLIIKLPKYSLFELENGRKRMLASAGELQKGNELALPSKYVNFLYLASHYEKLKGSPEDNEQKQLFVEQHKHYLDEIIEQISEFSKRVILADANLDKVLSAYNKHRDKPIREQAENIIHLFTLTNLGAPAAFKYFDTTIDRKRYTSTKEVLDATLIHQSITGLYETRIDLSQLGGDSGGSEAAAKEAAAKEAAAKEAAAKSGGSTLNIEDEYRLHETSKEPDVSLGSTWLSDFPQAWAETGGMGLAVRQAPLIIPLKATSTPVSIKQYPMSQEARLGIKPHIQRLLDQGILVPCQSPWNTPLLPVKKPGTNDYRPVQDLREVNKRVEDIHPTVPNPYNLLSGLPPSHQWYTVLDLKDAFFCLRLHPTSQPLFAFEWRDPEMGISGQLTWTRLPQGFKNSPTLFNEALHRDLADFRIQHPDLILLQYVDDLLLAATSELDCQQGTRALLQTLGNLGYRASAKKAQICQKQVKYLGYLLKEGQRWLTEARKETVMGQPTPKTPRQLREFLGKAGFCRLFIPGFAEMAAPLYPLTKPGTLFNWGPDQQKAYQEIKQALLTAPALGLPDLTKPFELFVDEKQGYAKGVLTQKLGPWRRPVAYLSKKLDPVAAGWPPCLRMVAAIAVLTKDAGKLTMGQPLVILAPHAVEALVKQPPDRWLSNARMTHYQALLLDTDRVQFGPVVALNPATLLPLPEEGLQHNCLDILAEAHGGGSKRTADGSEFEPKKKRKV

SEQ ID NO: 1118 - DNA, 5817 bp, synthetic construct
  source 1..5817: mol_type = other DNA
atgaaacggacagccgacggaagcgagttcgagtcaccaaagaagaagcggaaagtcgacaagaagtacagcatcggcctggacatcggcaccaactctgtgggctgggccgtgatcaccgacgagtacaaggtgcccagcaagaaattcaaggtgctgggcaacaccgaccggcacagcatcaagaagaacctgatcggagccctgctgttcgacagcggcgaaacagccgaggccacccggctgaagagaaccgccagaagaagatacaccagacggaagaaccggatctgctatctgcaagagatcttcagcaacgagatggccaaggtggacgacagcttcttccacagactggaagagtccttcctggtggaagaggataagaagcacgagcggcaccccatcttcggcaacatcgtggacgaggtggcctaccacgagaagtaccccaccatctaccacctgagaaagaaactggtggacagcaccgacaaggccgacctgcggctgatctatctggccctggcccacatgatcaagttccggggccacttcctgatcgagggcgacctgaaccccgacaacagcgacgtggacaagctgttcatccagctggtgcagacctacaaccagctgttcgaggaaaaccccatcaacgccagcggcgtggacgccaaggccatcctgtctgccagactgagcaagagcagacggctggaaaatctgatcgcccagctgcccggcgagaagaagaatggcctgttcggaaacctgattgccctgagcctgggcctgacccccaacttcaagagcaacttcgacctggccgaggatgccaaactgcagctgagcaaggacacctacgacgacgacctggacaacctgctggcccagatcggcgaccagtacgccgacctgtttctggccgccaagaacctgtccgacgccatcctgctgagcgacatcctgagagtgaacaccgagatcaccaaggcccccctgagcgcctctatgatcaagagatacgacgagcaccaccaggacctgaccctgctgaaagctctcgtgcggcagcagctgcctgagaagtacaaagagattttcttcgaccagagcaagaacggctacgccggctacattgacggcggagccagccaggaagagttctacaagttcatcaagcccatcctggaaaagatggacggcaccgaggaactgctcgtgaagctgaacagagaggacctgctgcggaagcagcggaccttcgacaacggcagcatcccccaccagatccacctgggagagctgcacgccattctgcggcggcaggaagatttttacccattcctgaaggacaaccgggaaaagatcgagaagatcctgaccttccgcatcccctactacgtgggccctctggccaggggaaacagcagattcgcctggatgaccagaaagagcgaggaaaccatcaccccctggaacttcgaggaagtggtggacaagggcgcttccgcccagagcttcatcgagcggatgaccaacttcgataagaacctgcccaacgagaaggtgctgcccaagcacagcctgctgtacgagtacttcaccgtgtataacgagctgaccaaagtgaaatacgtgaccgagggaatgagaaagcccgccttcctgagcggcgagcagaaaaaggccatcgtggacctgctgttcaagaccaaccggaaagtgaccgtgaagcagctgaaagaggactacttcaagaaaatcgagtgcttcgactccgtggaaatctccggcgtggaagatcggttcaacgcctccctgggcacataccacgatctgctgaaaattatcaaggacaaggacttcctggacaatgaggaaaacgaggacattctggaagatatcgtgctgaccctgacactgtttgaggacagagagatgatcgaggaacggctgaaaacctatgcccacctgttcgacgacaaagtgatgaagcagctgaagcggcggagatacaccggctggggcaggctgagccggaagctgatcaacggcatccgggacaagcagtccggcaagacaatcctggatttcctgaagtccgacggcttcgccaacagaaacttcatgcagctgatccacgacgacagcctgacctttaaagaggacatccagaaagcccaggtgtccggccagggcgatagcctgcacgagcacattgccaatctggccggcagccccgccattaagaagggcatcctgcagacagtgaaggtggtggacgagctcgtgaaagtgatgggccggcacaagcccgagaacatcgtgatcgaaatggccagagagaaccagaccacccagaagggacagaagaacagccgcgagagaatgaagcggatcgaagagggcatcaaagagctgggcagccagatcctgaaagaacaccccgtggaaaacacccagctgcagaacgagaagctgtacctgtactacctgcagaatgggcgggatatgtacgtggaccaggaactggacatcaaccggctgtccgactacgatgtggacgctatcgtgcctcagagctttctgaaggacgactccatcgacaacaaggtgctgaccagaagcgacaagaaccggggcaagagcgacaacgtgccctccgaagaggtcgtgaagaagatgaagaactactggcggcagctgctgaacgccaagctgattacccagagaaagttcgacaatctgaccaaggccgagagaggcggcctgagcgaactggataaggccggcttcatcaagagacagctggtggaaacccggcagatcacaaagcacgtggcacagatcctggactcccggatgaacactaagtacgacgagaatgacaagctgatccgggaagtgaaagtgatcaccctgaagtccaagctggtgtccgatttccggaaggatttccagttttacaaagtgcgcgagatcaacaactaccaccacgcccacgacgcctacctgaacgccgtcgtgggaaccgccctgatcaaaaagtaccctaagctggaaagcgagttcgtgtacggcgactacaaggtgtacgacgtgcggaagatgatcgccaagagcgagcaggaaatcggcaaggctaccgccaagtacttcttctacagcaacatcatgaactttttcaagaccgagattaccctggccaacggcgagatccggaagcggcctctgatcgagacaaacggcgaaaccggggagatcgtgtgggataagggccgggattttgccaccgtgcggaaagtgctgagcatgccccaagtgaatatcgtgaaaaagaccgaggtgcagacaggcggcttcagcaaagagtctatcctgcccaagaggaacagcgataagctgatcgccagaaagaaggactgggaccctaagaagtacggcggcttcgacagccccaccgtggcctattctgtgctggtggtggccaaagtggaaaagggcaagtccaagaaactgaagagtgtgaaagagctgctggggatcaccatcatggaaagaagcagcttcgagaagaatcccatcgactttctggaagccaagggctacaaagaagtgaaaaaggacctgatcatcaagctgcctaagtactccctgttcgagctggaaaacggccggaagagaatgctggcctctgccggcgaactgcagaagggaaacgaactggccctgccctccaaatatgtgaacttcctgtacctggccagccactatgagaagctgaagggctcccccgaggataatgagcagaaacagctgtttgtggaacagcacaagcactacctggacgagatcatcgagcagatcagcgagttctccaagagagtgatcctggccgacgctaatctggacaaagtgctgtccgcctacaacaagcaccgggataagcccatcagagagcaggccgagaatatcatccacctgtttaccctgaccaatctgggagcccctgccgccttcaagtactttgacaccaccatcgaccggaagaggtacaccagcaccaaagaggtgctggacgccaccctgatccaccagagcatcaccggcctgtacgagacacggatcgacctgtctcagctgggaggtgactccggcggcagcgaggccgccgccaaggaagccgccgccaaggaagccgctgccaaggaggccgctgctaaaagcggcggatctaccctgaacatcgaggacgagtacaggctgcacgagaccagcaaggagcccgacgtgagcctgggcagcacctggctgagcgatttccctcaggcttgggccgagaccggcggcatgggcctggccgtgcggcaggcccccctgattatccccctgaaggccaccagcacccccgtgagcatcaagcagtacccaatgtcccaggaggccaggctgggcatcaagcctcacatccagaggctgctggaccagggcatcctggtgccatgccagtccccctggaacacccctctgctgcccgtgaagaagcctggcaccaacgactaccggcccgtgcaggacctgagagaagtgaacaagcgggtggaggacatccacccaaccgtgcccaacccttacaacctgctgtccggcctgccccccagccaccagtggtacaccgtgctggacctgaaggacgccttcttctgcctgagactgcaccccacctctcagcccctgttcgccttcgagtggcgcgaccccgagatgggcatcagcggccagctgacctggaccagactgccacagggctttaagaatagcccaaccctgtttaacgaggccctgcacagggacctggccgacttcaggatccagcaccccgacctgattctgctgcagtacgtggacgacctgctgctggccgctaccagcgagctggactgccagcagggcaccagagccctgctgcagaccctgggcaacctgggctacagagccagcgccaagaaggcccagatctgtcagaagcaggtgaagtatctgggctacctgctgaaggaaggccagagatggctgaccgaggccagaaaggagactgtgatgggccagcccacccccaagacccccaggcagctgcgggagttcctgggcaaggccggcttttgcagactgtttatccctggcttcgccgagatggccgccccactgtaccctctgaccaagcctggcaccctgtttaactggggccccgaccagcagaaggcctaccaggagatcaagcaggccctgctgaccgcccccgccctgggcctgcccgacctgaccaagcctttcgagctgttcgtggacgagaagcagggatacgccaaaggcgtgctgacccagaagctgggcccctggcggaggcccgtggcctacctgagcaaaaaactggaccctgtggccgccggctggcccccatgcctgcggatggtggccgccatcgctgtgctgaccaaggacgccggcaagctgaccatgggccagcccctggtgatcctggcccctcacgccgtggaggctctggtgaagcagcctccagacaggtggctgtccaacgccaggatgacccactaccaggccctgctgctggacaccgaccgggtgcagttcggccctgtggtggccctgaaccccgccaccctgctgcctctgccagaggagggcctgcagcacaactgcctggacatcctggccgaggcccacggcggcggctccaaacgcaccgccgacgggagcgagttcgagcccaagaagaagaggaaagtctaa

What is claimed:

1. A method for treating a neoplasia in a subject in need thereof, the method comprising: administering to the subject
(i) an immunosuppressant agent; and
(ii) a modified allogeneic immune effector cell comprising a chimeric antigen receptor capable of specifically binding a marker expressed by a neoplastic cell present in the subject, wherein the allogeneic immune effector cell further comprises a base edit in its genome that confers resistance to the immunosuppressant agent relative to an unmodified allogeneic immune effector cell.

2. The method of claim 1, wherein the base edit reduces expression or activity of an FK506-binding protein 1A (FKBP1A), nuclear receptor subfamily 3, group C, member 1 (NR3C1), and/or peptidyl-prolyl isomerase A (PPIA) polypeptide relative to an unmodified allogeneic immune effector cell.

3. The method of claim 1, wherein the immunosuppressant agent is selected from the group consisting of mTOR inhibitors, calcineurin inhibitors, and glucocorticoids.

4. The method of claim 1, further comprising introducing the base edit to the modified allogeneic immune effector cell using a base editor system comprising:
(i) a base editor, or a polynucleotide encoding the base editor, wherein the base editor comprises a programmable DNA binding domain and a deaminase domain; and
(ii) a guide polynucleotide, or a polynucleotide encoding the guide polynucleotide, wherein the guide polynucleotide directs the base editor to effect a nucleobase alteration in a polynucleotide encoding a polypeptide selected from the group consisting of FK506-binding protein 1A (FKBP1A), nuclear receptor subfamily 3, group C, member 1 (NR3C1), and peptidyl-prolyl isomerase A (PPIA).

5. The method of claim 4, wherein the deaminase domain is an adenosine deaminase and/or a cytidine deaminase.

6. The method of claim 5, wherein the deaminase domain is TadA*8.20 or rAPOBEC1, and/or the base editor is ABE8.20m or rBE4 and the guide polynucleotide comprises at least 10 contiguous nucleotides of a spacer sequence listed in Table 2A.

7. A method for producing a modified allogeneic immune effector cell having increased resistance to an immunosuppressant agent, the method comprising contacting the cell with:
(i) a base editor, or a polynucleotide encoding the base editor, wherein the base editor comprises a programmable DNA binding domain and a deaminase domain; and
(ii) a guide polynucleotide, or a polynucleotide encoding the guide polynucleotide, wherein the guide polynucleotide directs the base editor to effect a nucleobase alteration in a polynucleotide encoding a polypeptide selected from the group consisting of FK506-binding protein 1A (FKBP1A), nuclear receptor subfamily 3, group C, member 1 (NR3C1), and peptidyl-prolyl isomerase A (PPIA);
wherein each nucleobase alteration effects a reduction in expression or activity of the encoded polypeptide, thereby increasing resistance of the modified immune effector cell to immunosuppression by an immunosuppressant agent selected from the group consisting of an mTOR inhibitor, calcineurin inhibitor, and glucocorticoid relative to an unmodified allogeneic immune effector cell.

8. The method of claim 7, wherein the deaminase domain is TadA*8.20 or rAPOBEC1, and/or the base editor is ABE8.20m or rBE4.

9. The method of claim 1, wherein the modified allogeneic immune effector cells further comprise a base edit that reduces expression of one or more polypeptides selected from the group consisting of beta-2-microglobulin (B2M), cluster of differentiation 3-epsilon (CD3e), cluster of differentiation 3-gamma (CD3g), class II major histocompatibility complex transactivator (CIITA), programmed cell death 1 (PD1), and T cell receptor constant region (TRAC) relative to an unmodified allogeneic immune effector cell.

10. A cell prepared according to the method of claim 7.

11. A pharmaceutical composition comprising the cell of claim 10 and a pharmaceutically acceptable excipient.

12. A base editor system comprising:
(i) a base editor, or a polynucleotide encoding the base editor, wherein the base editor comprises a programmable DNA binding domain and a deaminase domain; and
(ii) a guide polynucleotide, or a polynucleotide encoding the guide polynucleotide, wherein the guide polynucleotide directs the base editor to effect a nucleobase alteration in a polynucleotide encoding a polypeptide selected from the group consisting of FK506-binding protein 1A (FKBP1A), nuclear receptor subfamily 3, group C, member 1 (NR3C1), and peptidyl-prolyl isomerase A (PPIA).

13. The base editor system of claim 12, wherein the deaminase domain is TadA*8.20, and/or the base editor is ABE8.20m or rBE4.

14. A guide polynucleotide comprising a spacer with a sequence comprising at least 10 contiguous nucleotides selected from those sequences listed in Table 2A.

15. The guide polynucleotide of claim 14, wherein the guide polynucleotide comprises a scaffold comprising the following nucleotide sequence: GUUUUAGAGCUAGAAAUAGCAAGUUAAAAUAAGGCUAGUCCGUUAUCAACUUGAAAAAGUGGCA CCGAGUCGGUGCUUUU (SEQ ID NO: 317; SpCas9 scaffold sequence), or a fragment thereof capable of binding a Cas9 polypeptide.

16. The guide polynucleotide of claim 15, wherein the guide polynucleotide comprises a sequence comprising at least 10 contiguous nucleotides from the following sequence:
(SEQ ID NO: 553; TSBTx1538)
CUCACCGUCUCCUGGGGAGA.

17. A polynucleotide encoding the base editor system of claim 13.

18. A vector comprising the polynucleotide of claim 18.

19. A cell containing the base editor system of claim 7.

20. A pharmaceutical composition comprising the base editor system of claim 7.

21. A kit suitable for use in the method of claim 1.

22. A method for treating a leukemia or a lymphoma in a subject in need thereof, the method comprising administering to the subject
i) an immunosuppressant agent selected from the group consisting of mTOR inhibitors, calcineurin inhibitors, and glucocorticoids; and
ii) a modified allogeneic chimeric antigen receptor (CAR)-expressing T cell, wherein the CAR is capable of specifically binding a marker expressed by a leukemia or a lymphoma cell in the subject, wherein the modified allogeneic CAR T cell has increased resistance to the immunosuppressant agent relative to an unmodified allogeneic immune effector cell, and wherein the modified CAR T cell has been modified using a base editor system comprising:
(a) a base editor, or a polynucleotide encoding the base editor, wherein the base editor comprises an SpCas9 domain and a TadA*8.20 adenosine deaminase domain or an rAPOBEC1 domain; and
(b) a guide polynucleotide, or a polynucleotide encoding the guide polynucleotide, wherein the guide polynucleotide comprises a nucleotide sequence selected from those listed in Table 2A and directs the base editor to effect a nucleobase alteration in a polynucleotide encoding a polypeptide selected from the group consisting of FK506-binding protein 1A (FKBP1A), nuclear receptor subfamily 3, group C, member 1 (NR3C1), and peptidyl-prolyl isomerase A (PPIA), wherein the nucleobase alteration reduces or eliminates activity or expression of the polypeptide in the cell.
